(19) United States
(12) Patent Application Publication
(10) Pub. No.: US 2024/0158796 A1
(43) Pub. Date: May 16, 2024

(54) KETOHEXOKINASE (KHK) iRNA COMPOSITIONS AND METHODS OF USE THEREOF

(71) Applicant: Alnylam Pharmaceuticals, Inc., Cambridge, MA (US)

(72) Inventor: Gregory Hinkle, Plymouth, MA (US)

(21) Appl. No.: 18/215,848

(22) Filed: Jun. 29, 2023

Related U.S. Application Data
(63) Continuation of application No. 17/254,421, filed on Dec. 21, 2020, now abandoned.
(60) Provisional application No. 62/732,600, filed on Sep. 18, 2018.

(51) Int. Cl. C12N 15/113

(52) U.S. Cl. CPC C12N 15/1137; C12N 2310/14; C12N 2310/315; C12N 2310/346; C12N 2310/351; C12Y 207/01003

(57) ABSTRACT

The present invention relates to RNAi agents, e.g., dsRNA agents, targeting the ketohexokinase (KHK) gene. The invention also relates to methods of using such RNAi agents to inhibit expression of a KHK gene and to methods of treating or preventing a KHK-associated disease in a subject.

### RELATED APPLICATIONS

[0001] This application is a continuation of U.S. patent application Ser. No. 17/254,421, filed on Dec. 21, 2020 which in turn is a 35 U.S.C. § 371 national stage filing of International Application No.: PCT/US2019/051429, filed on Sep. 17, 2019, which in turn claims the benefit of priority to U.S. Provisional Patent Application No. 62/732,600, filed on Sep. 18, 2018. The entire contents of each of the foregoing applications are hereby incorporated herein by reference.

### REFERENCE TO ELECTRONIC SEQUENCE LISTING

[0002] The application contains a Sequence Listing which has been submitted electronically in .XML format and is hereby incorporated by reference in its entirety. Said .XML copy, created on Jan. 11, 2024, is named “121301_06004_SL.xml” and is 4,933,375 bytes in size. The sequence listing contained in this .XML file is part of the specification and is hereby incorporated by reference herein in its entirety.

### BACKGROUND OF THE INVENTION

[0003] Epidemiological studies have shown that a western diet is one of the leading causes of the modern obesity pandemic. Increase in fructose uptake, associated with the use of enriched soft drinks and processed food, is proposed to be a major contributing factor to the epidemic. High fructose corn sweeteners started gaining widespread use in the food industry by 1967. Although glucose and fructose have the same caloric value per molecule, the two sugars are metabolized differently and utilize different GLUT transporters. Fructose is almost exclusively metabolized in the liver, and unlike the glucose metabolism pathway, the fructose metabolism pathway is not regulated by feedback inhibition by the product (Khaitan Z et al., (2013) J. Nutr. Metab. 2013, Article ID 682673, 1-12). While hexokinase and phosphofructokinase (PFK) regulate the production of glyceraldehyde-3-P from glucose, fructokinase or ketohexokinase (KHK), which is responsible for phosphorylation of fructose to fructose-1-phosphate in the liver, it is not down regulated by increasing concentrations of fructose-1-phosphate. As a result, all fructose entering the cell is rapidly phosphorylated. (Cirillo P. et al., (2009) J. Am. Soc. Nephrol. 20: 545-553). Continued utilization of ATP to phosphorylate the fructose to fructose-1-phosphate results in intracellular phosphate depletion, ATP depletion, activation of AMP deaminase and formation of uric acid (Khaitan Z. et al., (2013) J. Nutr. Metab. Article ID 682673, 1-12). Increased uric acid further stimulates the up-regulation of KHK (Lanaspa M. A. et al., (2012) PLOS ONE 7(10): 1-11) and causes endothelial cell and adipocyte dysfunction. Fructose-1-phosphate is subsequently converted to glyceraldehyde by the action of aldolase B and is phosphorylated to glyceraldehyde-3-phosphate. The latter proceeds downstream to the glycolysis pathway to form pyruvate, which enters the citric acid cycle, wherefrom, under well-fed conditions, citrate is exported to the cytosol from the mitochondria, providing Acetyl Coenzyme A for lipogenesis (FIG. 1).

[0004] The phosphorylation of fructose by KHK, and subsequent activation of lipogenesis leads to, for example, fatty liver, hypertriglyceridemia, dyslipidemia, and insulin resistance. Proinflammatory changes in renal proximal tubular cells have also been shown to be induced by KHK activity (Cirillo P. et al., (2009) J. Am. Soc. Nephrol. 20: 545-553). The phosphorylation of fructose by KHK is associated with diseases, disorders or conditions such as liver disease (e.g., fatty liver, steatohepatitis), dyslipidemia (e.g., hyperlipidemia, high LDL cholesterol, low HDL cholesterol, hypertriglyceridemia, postprandial hypertriglyceridemia), disorders of glycemic control (e.g., insulin resistance, type 2 diabetes), cardiovascular disease (e.g., hypertension, endothelial cell dysfunction), kidney disease (e.g., acute kidney disorder, tubular dysfunction, proinflammatory changes to the proximal tubules, chronic kidney disease), metabolic syndrome, adipocyte dysfunction, visceral adipose deposition, obesity, hyperuricemia, gout, eating disorders, and excessive sugar craving. Accordingly, there is a need in the art for compositions and methods for treating diseases, disorders, and conditions associated with KHK activity.

### SUMMARY OF THE INVENTION

[0005] The present invention provides compositions comprising RNAi agents, e.g., double stranded RNAi agents, targeting ketohexokinase (KHK). The present invention also provides methods of using the compositions of the invention for inhibiting KHK expression or for treating a subject having a disorder that would benefit from reducing the expression of a KHK gene, e.g., a KHK-associated disease, such as liver disease (e.g., fatty liver, steatohepatitis, especially non-alcoholic steatohepatitis (NASH)), dyslipidemia (e.g., hyperlipidemia, high LDL cholesterol, low HDL cholesterol, hypertriglyceridemia, postprandial hypertriglyceridemia), disorders of glycemic control (e.g., insulin resistance, type 2 diabetes), cardiovascular disease (e.g., hypertension, endothelial cell dysfunction), kidney disease (e.g., acute kidney disorder, tubular dysfunction, proinflammatory changes to the proximal tubules, chronic kidney disease), metabolic syndrome, adipocyte dysfunction, visceral adipose deposition, obesity, hyperuricemia, gout, eating disorders, and excessive sugar craving.

[0006] In an aspect, the invention provides a double stranded ribonucleic acid (dsRNA) agent for inhibiting expression of ketohexokinase (KHK), wherein the dsRNA comprises a sense strand and an antisense strand, wherein the sense strand comprises at least 15 contiguous nucleotides differing by no more than 3 nucleotides from the nucleotide sequence of SEQ ID NO:1 and the antisense strand comprises at least 15 contiguous nucleotides differing by no more than 3 nucleotides from the nucleotide sequence of SEQ ID NO:2.

[0007] In certain embodiments, the sense strand comprises at least 15 contiguous nucleotides differing by no more than 3 nucleotides from the nucleotide sequence of any one of nucleotides 89-107, 176-194, 264-282, 474-492, 508-526, 529-547, 562-580, 616-646, 682-700, 705-723, 705-757, 705-799, 739-757, 739-799, 760-799, 804-822, 837-855, 892-910, 959-977, 992-1010, 922-1041, 1013-1041, 1069-1108, 1169-1140, 1111-1140, 1155-1196, 1221-1261, 1267-1294, or 1320-1350 of SEQ ID NO:1. In certain embodiments, the sense strand comprises at least 15 contiguous nucleotides of the nucleotide sequence of SEQ ID NO: 1, or one of the foregoing portions of the nucleotide sequence of SEQ ID NO: 1.

[0008] In certain embodiments, the sense strands and antisense strands comprise a nucleotide sequence selected from the group consisting of any one of the nucleotide sequences in Table 3 or 5.

[0009] In certain embodiments, the sense strand or the antisense strand comprise any one of the nucleotide sequences in any one of the duplexes selected from the group consisting of AD-72506, AD-72319, AD-72502, AD-72513, AD-72499, AD-72303, AD-72500, AD-72522, AD-72512, AD-72304, AD-72514, AD-72257, AD-72295, AD-72332, AD-72507, AD-72311, AD-72501, AD-72508, AD-72293, AD-72322, AD-72264, AD-72290, AD-72338, AD-72315, AD-72272, AD-72337, AD-72298, AD-72503, AD-72327, AD-72521, AD-72309, AD-72313, AD-72517, AD-72316, AD-72335, AD-72317, provided in Table 3 or 5. In certain embodiments, the sense strand and the antisense strand comprise the nucleotide sequence of any one of the duplexes selected from the group consisting of AD-72506, AD-72319, AD-72502, AD-72513, AD-72499, AD-72303, AD-72500, AD-72522, AD-72512, AD-72304, AD-72514, AD-72257, AD-72295, AD-72332, AD-72507, AD-72311, AD-72501, AD-72508, AD-72293, AD-72322, AD-72264, AD-72290, AD-72338, AD-72315, AD-72272, AD-72337, AD-72298, AD-72503, AD-72327, AD-72521, AD-72309, AD-72313, AD-72517, AD-72316, AD-72335, of AD-72317, provided in Table 3 or 5.

[0010] In an aspect, the invention provides a double stranded ribonucleic acid (dsRNA) agent for inhibiting expression of a ketohexokinase (KHK) gene, wherein the dsRNA comprises a sense strand and an antisense strand, the antisense strand comprising a region of complementarity which comprises at least 15 contiguous nucleotides differing by no more than 3 nucleotides from any one of the antisense sequences listed in Table 3 or 5. In certain embodiments, the dsRNA comprises a sense strand and an antisense strand, the antisense strand comprising a region of complementarity which comprises at least 15 contiguous nucleotides differing by no more than 3 nucleotides from any one of the antisense sequences in any one of the duplexes selected from the group consisting of AD-72506, AD-72319, AD-72502, AD-72513, AD-72499, AD-72303, AD-72500, AD-72522, AD-72512, AD-72304, AD-72514, AD-72257, AD-72295, AD-72332, AD-72507, AD-72311, AD-72501, AD-72508, AD-72293, AD-72322, AD-72264, AD-72290, AD-72338, AD-72315, AD-72272, AD-72337, AD-72298, AD-72503, AD-72327, AD-72521, AD-72309, AD-72313, AD-72517, AD-72316, AD-72335, or AD-72317.

[0011] In certain embodiments, the dsRNA comprises at least one modified nucleotide. In some embodiments, all of the nucleotides of the sense strand and all of the nucleotides of the antisense strand comprise a modification.

[0012] In an aspect, the invention provides a double stranded RNAi agent for inhibiting expression of a ketohexokinase (KHK) gene, wherein the dsRNA agent comprises a sense strand and an antisense strand forming a double stranded region, wherein the sense strand comprises at least 15 contiguous nucleotides differing by no more than 3 nucleotides from the nucleotide sequence of SEQ ID NO:1 and the antisense strand comprises at least 15 contiguous nucleotides differing by no more than 3 nucleotides from the nucleotide sequence of SEQ ID NO:2, wherein substantially all of the nucleotides of the sense strand and substantially all of the nucleotides of the antisense strand are modified nucleotides, and wherein the sense strand is conjugated to a ligand attached at the 3′-terminus. In certain embodiments, the sense strand comprises at least 15 contiguous nucleotides differing by no more than 3 nucleotides from the nucleotide sequence of any one of nucleotides 89-107, 176-194, 264-282, 474-492, 508-526, 529-547, 562-580, 616-646, 682-700, 705-723, 705-757, 705-799, 739-757, 739-799, 760-799, 804-822, 837-855, 892-910, 959-977, 992-1010, 922-1041, 1013-1041, 1069-1108, 1169-1140, 1111-1140, 1155-1196, 1221-1261, 1267-1294, or 1320-1350 of SEQ ID NO:1 and the antisense strand comprises at least 15 contiguous nucleotides differing by no more than 3 nucleotides from the nucleotide sequence of SEQ ID NO:2, wherein substantially all of the nucleotides of the sense strand and substantially all of the nucleotides of the antisense strand are modified nucleotides, and wherein the sense strand is conjugated to a ligand attached at the 3′-terminus. In certain embodiments, the sense strand comprises at least 15 contiguous nucleotides of SEQ ID NO: 1, or one of the foregoing portions of the nucleotide sequence of SEQ ID NO: 1, and at least 15 contiguous nucleotides of the corresponding portion of SEQ ID NO: 2, such that the sense and antisense strands are complementary to each other.

[0013] In one aspect, the present invention provides double stranded RNAi agents for inhibiting expression of KHK, which comprise a sense strand and an antisense strand forming a double stranded region, wherein the sense strand comprises at least 15 contiguous nucleotides differing by no more than 3 nucleotides from the nucleotide sequence of any one of nucleotides 89-107, 176-194, 264-282, 474-492, 508-526, 529-547, 562-580, 616-646, 682-700, 705-723, 705-757, 705-799, 739-757, 739-799, 760-799, 804-822, 837-855, 892-910, 959-977, 992-1010, 922-1041, 1013-1041, 1069-1108, 1169-1140, 1111-1140, 1155-1196, 1221-1261, 1267-1294, or 1320-1350 of SEQ ID NO:1 and the antisense strand comprises at least 15 contiguous nucleotides differing by no more than 3 nucleotides from the corresponding position of the nucleotide sequence of SEQ ID NO:2, such that the antisense strand is complementary to the at least 15 contiguous nucleotides differing by no more than 3 nucleotides in the sense strand. In certain embodiments, substantially all of the nucleotides of the sense strand or substantially all of the nucleotides of the antisense strand are modified nucleotides, or substantially all of the nucleotides of both strands are modified; and wherein the sense strand is conjugated to a ligand attached at the 3′-terminus.

[0014] In certain embodiments, the sense strand comprises at least 15 contiguous nucleotides of any one of nucleotides 89-107, 176-194, 264-282, 474-492, 508-526, 529-547, 562-580, 616-646, 682-700, 705-723, 705-757, 705-799, 739-757, 739-799, 760-799, 804-822, 837-855, 892-910, 959-977, 992-1010, 922-1041, 1013-1041, 1069-1108, 1169-1140, 1111-1140, 1155-1196, 1221-1261, 1267-1294, or 1320-1350 of SEQ ID NO:1, and the antisense strand comprises at least 15 contiguous nucleotides from the corresponding portion of nucleotide sequence of SEQ ID NO:2 such that the antisense strand is complementary to the at least 15 contiguous nucleotides differing by no more than 3 nucleotides in the sense strand. In certain embodiments, substantially all of the nucleotides of the sense strand or substantially all of the nucleotides of the antisense strand are modified nucleotides, or substantially all of the nucleotides of both strands are modified; and wherein the sense strand is conjugated to a ligand attached at the 3′-terminus.

[0015] In an aspect, the present invention also provides double stranded RNAi agents for inhibiting expression of KHK, which comprise a sense strand and an antisense strand forming a double stranded region, wherein the sense strand comprises at least 15 contiguous nucleotides of any one of nucleotides 89-107, 176-194, 264-282, 474-492, 508-526, 529-547, 562-580, 616-646, 682-700, 705-723, 705-757, 705-799, 739-757, 739-799, 760-799, 804-822, 837-855, 892-910, 959-977, 992-1010, 922-1041, 1013-1041, 1069-1108, 1169-1140, 1111-1140, 1155-1196, 1221-1261, 1267-1294, or 1320-1350 of SEQ ID NO:1 and the antisense strand comprises at least 15 contiguous nucleotides from the corresponding position of the nucleotide sequence of SEQ ID NO:2 such that the antisense strand is complementary to the at least 15 contiguous nucleotides in the sense strand. In certain embodiments, substantially all of the nucleotides of the sense strand are modified nucleotides. In certain embodiments, substantially all of the nucleotides of the antisense strand are modified nucleotides. In certain embodiments, substantially all of the nucleotides of both strands are modified. In preferred embodiments, the sense strand is conjugated to a ligand attached at the 3′-terminus.

[0016] In certain embodiments, the antisense strand comprises a region of complementarity which comprises at least 15 contiguous nucleotides differing by no more than 3 nucleotides from any one of the antisense sequences listed in any one of Tables 3 and 5. For example, in a certain embodiments, the antisense strand may comprise a region of complementarity which comprises at least 15 contiguous nucleotides differing by no more than 3 nucleotides from any one of the antisense sequences of any one of the duplexes selected from the group consisting of AD-72506, AD-72319, AD-72502, AD-72513, AD-72499, AD-72303, AD-72500, AD-72522, AD-72512, AD-72304, AD-72514, AD-72257, AD-72295, AD-72332, AD-72507, AD-72311, AD-72501, AD-72508, AD-72293, AD-72322, AD-72264, AD-72290, AD-72338, AD-72315, AD-72272, AD-72337, AD-72298, AD-72503, AD-72327, AD-72521, AD-72309, AD-72313, AD-72517, AD-72316, AD-72335, and AD-72317. In certain embodiments, the antisense strand comprises a region of complementarity to SEQ ID NO: 1 which comprises at least 15 contiguous nucleotides of any one of the antisense sequences of the foregoing duplexes.

[0017] In some embodiments, all of the nucleotides of the sense strand and all of the nucleotides of the antisense strand comprise a modification.

[0018] In one embodiment, at least one of the modified nucleotides is selected from the group consisting of a deoxy-nucleotide, a 3′-terminal deoxy-thymine (dT) nucleotide, a 2′-O-methyl modified nucleotide, a 2′-fluoro modified nucleotide, a 2′-deoxy-modified nucleotide, a locked nucleotide, an unlocked nucleotide, a conformationally restricted nucleotide, a constrained ethyl nucleotide, an abasic nucleotide, a 2′-amino-modified nucleotide, a 2′-O-allyl-modified nucleotide, 2′-C-alkyl-modified nucleotide, 2′-hydroxly-modified nucleotide, a 2′-methoxyethyl modified nucleotide, a 2′-O-alkyl-modified nucleotide, a morpholino nucleotide, a phosphoramidate, a non-natural base comprising nucleotide, a tetrahydropyran modified nucleotide, a 1,5-anhydrohexitol modified nucleotide, a cyclohexenyl modified nucleotide, a nucleotide comprising a phosphorothioate group, a nucleotide comprising a methylphosphonate group, a nucleotide comprising a 5′-phosphate, and a nucleotide comprising a 5′-phosphate mimic. In another embodiment, the modified nucleotides comprise a short sequence of 3′-terminal deoxy-thymine nucleotides (dT).

[0019] In certain embodiments, substantially all of the nucleotides of the sense strand are modified. In certain embodiments, substantially all of the nucleotides of the antisense strand are modified. In certain embodiments, substantially all of the nucleotides of both the sense strand and the antisense strand are modified.

[0020] In certain embodiments, the duplex comprises a modified antisense strand nucleotide sequence provided in Table 5. In certain embodiments, the duplex comprises a modified sense strand nucleotide sequence provided in Table 5. In certain embodiments, the duplex comprises a modified duplex provided in Table 5.

[0021] In certain embodiments, the region of complementarity between the antisense strand and the target mRNA nucleotide sequence is at least 17 nucleotides in length. For example, the region of complementarity between the antisense strand and the target is 19 to 21 nucleotides in length, for example, the region of complementarity is 21 nucleotides in length. In preferred embodiments, each strand is no more than 30 nucleotides in length.

[0022] In other embodiments, one or both of the strands of the double stranded RNAi agents of the invention is up to 66 nucleotides in length, e.g., 36-66, 26-36, 25-36, 31-60, 22-43, 27-53 nucleotides in length, with a region of at least 19 contiguous nucleotides that is substantially complementary to at least a part of an mRNA transcript of an KHK gene. In some embodiments, the sense and antisense strands form a duplex of 18-30 contiguous nucleotides.

[0023] In one embodiment, at least one strand of the dsRNA agent comprises a 3′ overhang of at least 1 nucleotide. In certain embodiments, at least one strand comprises a 3′ overhang of at least 2 nucleotides, e.g., 2, 3, 4, 5, 6, 7, 9, 10, 11, 12, 13, 14, or 15 nucleotides. In other embodiments, at least one strand of the RNAi agent comprises a 5′ overhang of at least 1 nucleotide. In certain embodiments, at least one strand comprises a 5′ overhang of at least 2 nucleotides, e.g., 2, 3, 4, 5, 6, 7, 9, 10, 11, 12, 13, 14, or 15 nucleotides. In still other embodiments, both the 3′ and the 5′ end of one strand of the RNAi agent comprise an overhang of at least 1 nucleotide.

[0024] In certain embodiments, the double stranded RNAi agent further comprises a ligand. In certain embodiments, the ligand is an N-acetylgalactosamine (GalNAc). The ligand may be one or more GalNAc attached to the RNAi agent through a monovalent, a bivalent, or a trivalent branched linker. The ligand may be conjugated to the 3′ end of the sense strand of the double stranded RNAi agent, the 5′ end of the sense strand of the double stranded RNAi agent, the 3′ end of the antisense strand of the double stranded RNAi agent, or the 5′ end of the antisense strand of the double stranded RNAi agent.

[0025] In some embodiments, the double stranded RNAi agents of the invention comprise a plurality, e.g., 2, 3, 4, 5, or 6, of GalNAc, each independently attached to a plurality of nucleotides of the double stranded RNAi agent through a plurality of monovalent linkers.

[0026] In certain embodiments, the ligand is

[chemical structure]

[0027] In certain embodiments, the double stranded RNAi agent is conjugated to the ligand as shown in the following schematic

[chemical structure]

and, wherein X is O or S. In one embodiment, the X is O.

[0028] In certain embodiments, the region of complementarity comprises any one of the antisense nucleotide sequences of Table 3 or Table 5. In another embodiment, the region of complementarity consists of one of the antisense nucleotide sequences of Table 3 or Table 5.

[0029] In another aspect, the invention provides a double stranded RNAi agent for inhibiting the expression of a KHK gene, wherein the double stranded RNAi agent comprises a sense strand, wherein the sense strand comprises at least 15 contiguous nucleotides of the nucleotide sequence of any one of nucleotides 89-107, 176-194, 264-282, 474-492, 508-526, 529-547, 562-580, 616-646, 682-700, 705-723, 705-757, 705-799, 739-757, 739-799, 760-799, 804-822, 837-855, 892-910, 959-977, 992-1010, 922-1041, 1013-1041, 1069-1108, 1169-1140, 1111-1140, 1155-1196, 1221-1261, 1267-1294, or 1320-1350 of SEQ ID NO: 1, and the sense strand is complementary to the antisense strand, wherein the antisense strand comprises a region complementary to part of an mRNA encoding KHK, wherein each strand is about 14 to about 30 nucleotides in length, wherein the dsRNA agent is represented by formula (III):

sense: 5′ nₚ-Nₐ-(XXX)ᵢ-N_{b}-YYY-N_{b}-(ZZZ)ⱼ-Nₐ-n_{q} 3′

antisense: 3′ nₚ′-Nₐ′-(X′X′X′)ₖ-N_{b}′-Y′Y′Y′-N_{b}′-(Z′Z′Z′)ₗ-Nₐ′-n_{q}′ 5′ (III)
[0030] wherein: i, j, k, and l are each independently 0 or 1; p, p′, q, and q′ are each independently 0-6; each Nₐ and Nₐ′ independently represents an oligonucleotide sequence comprising 0-25 nucleotides which are either modified or unmodified or combinations thereof, each sequence comprising at least two differently modified nucleotides; each N_{b} and N_{b}′ independently represents an oligonucleotide sequence comprising 0-10 nucleotides which are either modified or unmodified or combinations thereof; each nₚ, nₚ′, n_{q}, and n_{q}′, each of which may or may not be present, independently represents an overhang nucleotide; XXX, YYY, ZZZ, X′X′X′, Y′Y′Y′, and Z′Z′Z′ each independently represent one motif of three identical modifications on three consecutive nucleotides; modifications on N_{b} differ from the modification on Y and modifications on N_{b}′ differ from the modification on Y′; and wherein the sense strand is conjugated to at least one ligand.

[0031] In certain embodiments, i is 0; j is 0; i is 1; j is 1; both i and j are 0; or both i and j are 1. In another embodiment, k is 0; 1 is 0; k is 1; 1 is 1; both k and 1 are 0; or both k and l are 1. In another embodiment, XXX is complementary to X′X′X′, YYY is complementary to Y′Y′Y′, and ZZZ is complementary to Z′Z′Z′. In another embodiment, the YYY motif occurs at or near the cleavage site of the sense strand. In another embodiment, the Y′Y′Y′ motif occurs at the 11, 12 and 13 positions of the antisense strand from the 5′-end. In one embodiment, the Y′ is 2′-O-methyl.

[0032] For example, formula (III) can be represented by formula (IIIa):

sense: 5′ nₚ-Nₐ-YYY-Nₐ-n_{q} 3′

antisense: 3′ n_{p′}-Nₐ′-Y′Y′Y′-Nₐ′-n_{q}′ 5′ (IIIa).

[0033] In another embodiment, formula (III) is represented by formula (IIIb):

sense: 5′ nₚ-Nₐ-YYY-N_{b}-ZZZ-Nₐ-n_{q} 3′

antisense: 3′ n_{p′}-Nₐ′-Y′Y′Y′-N_{b}′-Z′Z′Z′-Nₐ′-n_{q}′ 5′ (IIb)
[0034] wherein each N_{b} and N_{b}′ independently represents an oligonucleotide sequence comprising 1-5 modified nucleotides.

[0035] Alternatively, formula (III) can be represented by formula (IIIc):

sense: 5′ nₚ-Nₐ-XXX-N_{b}-YYY-Nₐ-n_{q} 3′

antisense: 3′ nₚ′-Nₐ′-X′X′X′-N_{b}′-Y′Y′Y′-Nₐ′-n_{q}′ 5′ (IIc)
[0036] wherein each N_{b} and N_{b}′ independently represents an oligonucleotide sequence comprising 1-5 modified nucleotides.

[0037] Further, formula (III) can be represented by formula (IIId):

sense: 5′ nₚ-Nₐ-XXX-N_{b}-YYY-N_{b}-ZZZ-Nₐ-n_{q} 3′

antisense: 3′ nₚ′-Nₐ′-X′X′X′-N_{b}′-Y′Y′Y′-N_{b}′-Z′Z′Z′-Nₐ′-n_{q}′ 5′ (IIId)
[0038] wherein each N_{b} and N_{b}′ independently represents an oligonucleotide sequence comprising 1-5 modified nucleotides and each Nₐ and Nₐ′ independently represents an oligonucleotide sequence comprising 2-10 modified nucleotides.

[0039] In certain embodiments, the double stranded region is 15-30 nucleotide pairs in length. For example, the double stranded region can be 17-23 nucleotide pairs in length. The double stranded region can be 17-25 nucleotide pairs in length. The double stranded region can be 23-27 nucleotide pairs in length. The double stranded region can be 19-21 nucleotide pairs in length. The double stranded region can be 21-23 nucleotide pairs in length.

[0040] In certain embodiments, each strand has 15-30 nucleotides. In other embodiments, each strand has 19-30 nucleotides.

[0041] Modifications on the nucleotides may be selected from the group including, but not limited to, LNA, HNA, CeNA, 2′-methoxyethyl, 2′-O-alkyl, 2′-O-allyl, 2′-C-allyl, 2′-fluoro, 2′-deoxy, 2′-hydroxyl, and combinations thereof. In one embodiment, the modifications on the nucleotides are 2′-O-methyl or 2′-fluoro modifications.

[0042] In certain embodiments, the ligand is an N-acetylgalactosamine (GalNAc). The ligand may be one or more GalNAc attached to the RNAi agent through a monovalent, a bivalent, or a trivalent branched linker. The ligand may be conjugated to the 3′ end of the sense strand of the double stranded RNAi agent, the 5′ end of the sense strand of the double stranded RNAi agent, the 3′ end of the antisense strand of the double stranded RNAi agent, or the 5′ end of the antisense strand of the double stranded RNAi agent.

[0043] In some embodiments, the double stranded RNAi agents of the invention comprise a plurality, e.g., 2, 3, 4, 5, or 6, of GalNAc, each independently attached to a plurality of nucleotides of the double stranded RNAi agent through a plurality of monovalent linkers. In one embodiment, the ligand is

[chemical structure]

[0044] The ligand can be attached to the 3′ end of the sense strand.

[0045] An exemplary structure of a dsRNAi agent conjugated to the ligand is shown in the following schematic

[chemical structure]

[0046] In certain embodiments, the RNAi agent further comprises at least one phosphorothioate or methylphosphonate internucleotide linkage. For example the phosphorothioate or methylphosphonate internucleotide linkage can be at the 3′-terminus of one strand, i.e., the sense strand or the antisense strand; or at the ends of both strands, the sense strand and the antisense strand.

[0047] In certain embodiments, the phosphorothioate or methylphosphonate internucleotide linkage is at the 5′-terminus of one strand, i.e., the sense strand or the antisense strand; or at the ends of both strands, the sense strand and the antisense strand.

[0048] In certain embodiments, the phosphorothioate or methylphosphonate internucleotide linkage is at both the 5′- and 3′-terminus of one strand, i.e., the sense strand or the antisense strand; or at the ends of both strands, the sense strand and the antisense strand.

[0049] In certain embodiments, the base pair at the 1 position of the 5′-end of the antisense strand of the duplex is an AU base pair.

[0050] In certain embodiments, the Y nucleotides contain a 2′-fluoro modification. In another embodiment, the Y′ nucleotides contain a 2′-O-methyl modification. In another embodiment, p′>0. In some embodiments, p′=2. In some embodiments, q′=0, p=0, q=0, and p′ overhang nucleotides are complementary to the target mRNA. In some embodiments, q′=0, p=0, q=0, and p′ overhang nucleotides are non-complementary to the target mRNA.

[0051] In certain embodiments, the sense strand has a total of 21 nucleotides and the antisense strand has a total of 23 nucleotides.

[0052] In certain embodiments, at least one nₚ′ is linked to a neighboring nucleotide via a phosphorothioate linkage. In other embodiments, all nₚ′ are linked to neighboring nucleotides via phosphorothioate linkages.

[0053] In certain embodiments, the dsRNAi agent is selected from the group of dsRNAi agents listed in Tables 3 and 5. In certain embodiments, all of the nucleotides of the sense strand and all of the nucleotides of the antisense strand comprise a modification.

[0054] In an aspect, the invention provides a double stranded RNAi agent capable of inhibiting the expression of KHK in a cell, wherein the dsRNA agent comprises a sense strand, wherein the sense strand comprises an at least 15 contiguous nucleotide portion of any one of nucleotides 89-107, 176-194, 264-282, 474-492, 508-526, 529-547, 562-580, 616-646, 682-700, 705-723, 705-757, 705-799, 739-757, 739-799, 760-799, 804-822, 837-855, 892-910, 959-977, 992-1010, 922-1041, 1013-1041, 1069-1108, 1169-1140, 1111-1140, 1155-1196, 1221-1261, 1267-1294, or 1320-1350 of SEQ ID NO: 1, and the sense strand is complementary to an antisense strand, wherein the antisense strand comprises a region complementary to part of an mRNA encoding KHK, wherein each strand is about 14 to about 30 nucleotides in length, wherein the dsRNA agent is represented by formula (III):

sense: 5′ nₚ-Nₐ-(XXX)ᵢ-N_{b}-YYY-N_{b}-(ZZZ)ⱼ-Nₐ-n_{q} 3′

antisense: 3′ nₚ′-Nₐ′-(X′X′X′)ₖ-N_{b}′-Y′Y′Y′-N_{b}′-(Z′Z′Z′)ₗ-Nₐ′-n_{q}′ 5′ (III)
[0055] wherein i, j, k, and l are each independently 0 or 1; p, p′, q, and q′ are each independently 0-6; each Nₐ and Nₐ′ independently represents an oligonucleotide sequence comprising 0-25 nucleotides which are either modified or unmodified or combinations thereof, each sequence comprising at least two differently modified nucleotides; each N_{b} and N_{b}′ independently represents an oligonucleotide sequence comprising 0-10 nucleotides which are either modified or unmodified or combinations thereof; each nₚ, nₚ′, n_{q}, and n_{q}′, each of which may or may not be present independently represents an overhang nucleotide; XXX, YYY, ZZZ, X′X′X′, Y′Y′Y′, and Z′Z′Z′ each independently represent one motif of three identical modifications on three consecutive nucleotides, and wherein the modifications are 2′-O-methyl or 2′-fluoro modifications; modifications on N_{b} differ from the modification on Y and modifications on N_{b}′ differ from the modification on Y′; and wherein the sense strand is conjugated to at least one ligand.

[0056] In an aspect, the invention provides a double stranded RNAi agent capable of inhibiting the expression of KHK in a cell, wherein the dsRNA agent comprises a sense strand, wherein the sense strand preferably comprises an at least 15 contiguous nucleotide portion of any one of nucleotides 89-107, 176-194, 264-282, 474-492, 508-526, 529-547, 562-580, 616-646, 682-700, 705-723, 705-757, 705-799, 739-757, 739-799, 760-799, 804-822, 837-855, 892-910, 959-977, 992-1010, 922-1041, 1013-1041, 1069-1108, 1169-1140, 1111-1140, 1155-1196, 1221-1261, 1267-1294, or 1320-1350 of SEQ ID NO: 1, and the sense strand is complementary to an antisense strand, wherein the antisense strand comprises a region complementary to part of an mRNA encoding KHK, wherein each strand is about 14 to about 30 nucleotides in length, wherein the dsRNA agent is represented by formula (III):

sense: 5′ nₚ-Nₐ-(XXX)ᵢ-N_{b}-YYY-N_{b}-(ZZZ)ⱼ-Nₐ-n_{q} 3′

antisense: 3′ nₚ′-Nₐ′-(X′X′X′)ₖ-N_{b}′-Y′Y′Y′-N_{b}′-(Z′Z′Z′)ₗ-Nₐ′-n_{q}′ 5′ (III)
[0057] wherein: i, j, k, and l are each independently 0 or 1; each nₚ, n_{q}, and n_{q}′, each of which may or may not be present, independently represents an overhang nucleotide;
[0058] p, q, and q′ are each independently 0-6; nₚ′>0 and at least one nₚ′ is linked to a neighboring nucleotide via a phosphorothioate linkage; each Nₐ and Nₐ′ independently represents an oligonucleotide sequence comprising 0-25 nucleotides which are either modified or unmodified or combinations thereof, each sequence comprising at least two differently modified nucleotides; each N_{b} and N_{b}′ independently represents an oligonucleotide sequence comprising 0-10 nucleotides which are either modified or unmodified or combinations thereof; XXX, YYY, ZZZ, X′X′X′, Y′Y′Y′, and Z′Z′Z′ each independently represent one motif of three identical modifications on three consecutive nucleotides, and wherein the modifications are 2′-O-methyl or 2′-fluoro modifications; modifications on N_{b} differ from the modification on Y and modifications on N_{b}′ differ from the modification on Y′; and wherein the sense strand is conjugated to at least one ligand.

[0059] In certain embodiments, the invention provides a double stranded RNAi agent capable of inhibiting the expression of KHK in a cell, wherein the double stranded RNAi agent comprises a sense strand, wherein the sense strand comprises an at least 15 contiguous nucleotide portion of any one of nucleotides 89-107, 176-194, 264-282, 474-492, 508-526, 529-547, 562-580, 616-646, 682-700, 705-723, 705-757, 705-799, 739-757, 739-799, 760-799, 804-822, 837-855, 892-910, 959-977, 992-1010, 922-1041, 1013-1041, 1069-1108, 1169-1140, 1111-1140, 1155-1196, 1221-1261, 1267-1294, or 1320-1350 of SEQ ID NO: 1, and the sense strand is complementary to an antisense strand, wherein the antisense strand comprises a region complementary to part of an mRNA encoding KHK, wherein each strand is about 14 to about 30 nucleotides in length, wherein the dsRNA agent is represented by formula (III):

sense: 5′ nₚ-Nₐ-(XXX)ᵢ-N_{b}-YYY-N_{b}-(ZZZ)ⱼ-Nₐ-n_{q} 3′

antisense: 3′ nₚ′-Nₐ′-(X′X′X′)ₖ-N_{b}′-Y′Y′Y′-N_{b}′-(Z′Z′Z′)ₗ-Nₐ′-n_{q}′ 5′ (III)
[0060] wherein i, j, k, and l are each independently 0 or 1; each nₚ, n_{q}, and n_{q}′, each of which may or may not be present, independently represents an overhang nucleotide; p, q, and q′ are each independently 0-6; nₚ′>0 and at least one nₚ′ is linked to a neighboring nucleotide via a phosphorothioate linkage; each Nₐ and Nₐ′ independently represents an oligonucleotide sequence comprising 0-25 nucleotides which are either modified or unmodified or combinations thereof, each sequence comprising at least two differently modified nucleotides; each N_{b} and N_{b}′ independently represents an oligonucleotide sequence comprising 0-10 nucleotides which are either modified or unmodified or combinations thereof; XXX, YYY, ZZZ, X′X′X′, Y′Y′Y′, and Z′Z′Z′ each independently represent one motif of three identical modifications on three consecutive nucleotides, and wherein the modifications are 2′-O-methyl or 2′-fluoro modifications; modifications on N_{b} differ from the modification on Y and modifications on N_{b}′ differ from the modification on Y′; and wherein the sense strand is conjugated to at least one ligand, wherein the ligand is one or more GalNAc derivatives attached through a bivalent or trivalent branched linker.

[0061] In an aspect, the invention provides a double stranded RNAi agent capable of inhibiting the expression of KHK in a cell, wherein the dsRNA agent comprises a sense strand, wherein the sense strand comprises an at least 15 contiguous nucleotide portion of any one of nucleotides 89-107, 176-194, 264-282, 474-492, 508-526, 529-547, 562-580, 616-646, 682-700, 705-723, 705-757, 705-799, 739-757, 739-799, 760-799, 804-822, 837-855, 892-910, 959-977, 992-1010, 922-1041, 1013-1041, 1069-1108, 1169-1140, 1111-1140, 1155-1196, 1221-1261, 1267-1294, or 1320-1350 of SEQ ID NO: 1, and the sense strand is complementary to an antisense strand, wherein the antisense strand comprises a region complementary to part of an mRNA encoding KHK, wherein each strand is about 14 to about 30 nucleotides in length, wherein the dsRNA agent is represented by formula (III):

sense: 5′ nₚ-Nₐ-(XXX)ᵢ-N_{b}-YYY-N_{b}-(ZZZ)ⱼ-Nₐ-n_{q} 3′

antisense: 3′ nₚ′-Nₐ′-(X′X′X′)ₖ-N_{b}′-Y′Y′Y′-N_{b}′-(Z′Z′Z′)ₗ-Nₐ′-n_{q}′ 5′ (III)
[0062] wherein i, j, k, and l are each independently 0 or 1; each nₚ, n_{q}, and n_{q}′, each of which may or may not be present, independently represents an overhang nucleotide; p, q, and q′ are each independently 0-6; nₚ′>0 and at least one nₚ′ is linked to a neighboring nucleotide via a phosphorothioate linkage; each Nₐ and Nₐ′ independently represents an oligonucleotide sequence comprising 0-25 nucleotides which are either modified or unmodified or combinations thereof, each sequence comprising at least two differently modified nucleotides; each N_{b} and N_{b}′ independently represents an oligonucleotide sequence comprising 0-10 nucleotides which are either modified or unmodified or combinations thereof; XXX, YYY, ZZZ, X′X′X′, Y′Y′Y′, and Z′Z′Z′ each independently represent one motif of three identical modifications on three consecutive nucleotides, and wherein the modifications are 2′-O-methyl or 2′-fluoro modifications; modifications on N_{b} differ from the modification on Y and modifications on N_{b}′ differ from the modification on Y′; wherein the sense strand comprises at least one phosphorothioate linkage; and wherein the sense strand is conjugated to at least one ligand, wherein the ligand is one or more GalNAc derivatives attached through a bivalent or trivalent branched linker.

[0063] In an aspect, the invention provides a double stranded RNAi agent capable of inhibiting the expression of KHK in a cell, wherein the dsRNA agent comprises a sense strand, wherein the sense strand comprises an at least 15 contiguous nucleotide portion of any one of nucleotides 89-107, 176-194, 264-282, 474-492, 508-526, 529-547, 562-580, 616-646, 682-700, 705-723, 705-757, 705-799, 739-757, 739-799, 760-799, 804-822, 837-855, 892-910, 959-977, 992-1010, 922-1041, 1013-1041, 1069-1108, 1169-1140, 1111-1140, 1155-1196, 1221-1261, 1267-1294, or 1320-1350 of SEQ ID NO: 1, and the sense strand is complementary to an antisense strand, wherein the antisense strand comprises a region complementary to part of an mRNA encoding KHK, wherein each strand is about 14 to about 30 nucleotides in length, wherein the dsRNA agent is represented by formula (III):

sense: 5′ nₚ-Nₐ-YYY-Nₐ-n_{q} 3′

antisense: 3′ nₚ′-Nₐ′-Y′Y′Y′-Nₐ′-n_{q}′ 5′ (IIIa)
[0064] wherein each nₚ, n_{q}, and n_{q}′, each of which may or may not be present, independently represents an overhang nucleotide; p, q, and q′ are each independently 0-6; nₚ′>0 and at least one nₚ′ is linked to a neighboring nucleotide via a phosphorothioate linkage; each Nₐ and Nₐ′ independently represents an oligonucleotide sequence comprising 0-25 nucleotides which are either modified or unmodified or combinations thereof, each sequence comprising at least two differently modified nucleotides; YYY and Y′Y′Y′ each independently represent one motif of three identical modifications on three consecutive nucleotides, and wherein the modifications are 2′-O-methyl or 2′-fluoro modifications; wherein the sense strand comprises at least one phosphorothioate linkage; and wherein the sense strand is conjugated to at least one ligand, wherein the ligand is one or more GalNAc derivatives attached through a bivalent or trivalent branched linker.

[0065] In an aspect, the invention provides a double stranded RNAi agent for inhibiting expression of KHK, wherein the double stranded RNAi agent comprises a sense strand and an antisense strand forming a double stranded region, wherein the sense strand comprises at least 15 contiguous nucleotides differing by no more than 3 nucleotides from the nucleotide sequence of SEQ ID NO:1, for example, 15 contiguous nucleotides differing by no more than 3 nucleotides selected from the nucleotide sequence of any one of nucleotides 89-107, 176-194, 264-282, 474-492, 508-526, 529-547, 562-580, 616-646, 682-700, 705-723, 705-757, 705-799, 739-757, 739-799, 760-799, 804-822, 837-855, 892-910, 959-977, 992-1010, 922-1041, 1013-1041, 1069-1108, 1169-1140, 1111-1140, 1155-1196, 1221-1261, 1267-1294, or 1320-1350 or SEQ ID NO: 1, and the antisense strand comprises at least 15 contiguous nucleotides differing by no more than 3 nucleotides from the nucleotide sequence of SEQ ID NO:2, wherein substantially all of the nucleotides of the sense strand comprise a modification selected from a 2′-O-methyl modification and a 2′-fluoro modification, wherein the sense strand comprises two phosphorothioate internucleotide linkages at the 5′-terminus, wherein substantially all of the nucleotides of the antisense strand comprise a modification selected from a 2′-O-methyl modification and a 2′-fluoro modification, wherein the antisense strand comprises two phosphorothioate internucleotide linkages at the 5′-terminus and two phosphorothioate internucleotide linkages at the 3′-terminus, and wherein the sense strand is conjugated to one or more GalNAc derivatives attached through a monovalent or branched bivalent or trivalent linker at the 3′-terminus.

[0066] In certain embodiments, the sense strand comprises at least 15 contiguous nucleotides of SEQ ID NO: 1, or any one of the foregoing indicated portions of SEQ ID NO: 1, and at least 15 contiguous nucleotides of the corresponding portion of SEQ ID NO: 2 such that the antisense strand is complementary to the at least 15 contiguous nucleotides differing by no more than 3 nucleotides in the sense strand. In certain embodiments, the sense strand and the antisense strance comprise at least 15 consecutive nucleotides of SEQ ID NO: 1 and SEQ ID NO: 2, or any one of the indicated portions of SEQ ID NO: 1 and the corresponding portion of SEQ ID NO: 2.

[0067] In certain embodiments, all of the nucleotides of the sense strand and all of the nucleotides of the antisense strand are modified nucleotides. In certain embodiments, each strand has 19-30 nucleotides.

[0068] In certain embodiments, substantially all of the nucleotides of the sense strand are modified. In certain embodiments, substantially all of the nucleotides of the antisense strand are modified. In certain embodiments, substantially all of the nucleotides of both the sense strand and the antisense strand are modified.

[0069] In an aspect, the invention provides a cell containing a dsRNA agent as described herein.

[0070] In an aspect, the invention provides a vector encoding at least one strand of a dsRNA agent, wherein the antisense strand comprises a region of complementarity to at least a part of an mRNA encoding KHK, wherein the dsRNA is 30 base pairs or less in length, and wherein the dsRNA agent targets the mRNA for cleavage. In certain embodiments, the region of complementarity is at least 15 nucleotides in length. In certain embodiments, the region of complementarity is 19 to 23 nucleotides in length.

[0071] In an aspect, the invention provides a cell comprising a vector as described herein.

[0072] In an aspect, the invention provides a pharmaceutical composition for inhibiting expression of a KHK gene comprising the dsRNA agent of the invention. In one embodiment, the dsRNAi agent is administered in an unbuffered solution. In certain embodiments, the unbuffered solution is saline or water. In other embodiments, the dsRNAi agent is administered with a buffer solution. In such embodiments, the buffer solution can comprises acetate, citrate, prolamine, carbonate, or phosphate, or any combination thereof. For example, the buffer solution can be phosphate buffered saline (PBS).

[0073] In an aspect, the invention provides a pharmaceutical composition comprising the dsRNA agent of the invention and a lipid formulation. In certain embodiments, the lipid formulation comprises a LNP. In certain embodiments, the lipid formulation comprises a MC3.

[0074] In an aspect, the invention provides a method of inhibiting KHK expression in a cell, the method comprising (a) contacting the cell with the dsRNA agent of the invention or a pharmaceutical composition of the invention; and (b) maintaining the cell produced in step (a) for a time sufficient to obtain degradation of the mRNA transcript of a KHKgene, thereby inhibiting expression of the KHK gene in the cell. In certain embodiments, the cell is within a subject, for example, a human subject, for example a female human or a male human. In certain embodiments, the subject has or is susceptible to reduced kidney function. In preferred embodiments, KHK expression is inhibited by at least 20%, 30%, 40%, 50%, 60%, 70%, 80%, 90%, or 95% as compared to an appropriate control, or lowered to below the threshold of detection. In certain embodiments, the sense strand comprises at least 15 contiguous nucleotides with no more than three mismatches from SEQ ID NO: 1, or comprises any one of nucleotides 89-107, 176-194, 264-282, 474-492, 508-526, 529-547, 562-580, 616-646, 682-700, 705-723, 705-757, 705-799, 739-757, 739-799, 760-799, 804-822, 837-855, 892-910, 959-977, 992-1010, 922-1041, 1013-1041, 1069-1108, 1169-1140, 1111-1140, 1155-1196, 1221-1261, 1267-1294, or 1320-1350 of SEQ ID NO: 1 and at least 15 contiguous nucleotides of the corresponding portion of SEQ ID NO: 2 such that the antisense strand is complementary to the at least 15 contiguous nucleotides differing by no more than 3 nucleotides in the sense strand. In certain embodiments, the sense strand and the antisense strance comprise at least 15 consecutive nucleotides of SEQ ID NO: 1 and SEQ ID NO: 2 or one of the indicated portions of SEQ ID NO: 1 and the corresponding portion of SEQ ID NO: 2 such that the antisense strand is complementary to the at least 15 contiguous nucleotides differing by no more than 3 nucleotides in the sense strand.

[0075] In an aspect, the invention provides a method of treating a subject having a disease or disorder that would benefit from reduction in KHK expression, the method comprising administering to the subject a therapeutically effective amount of the dsRNA agent of the invention or a pharmaceutical composition of the invention, thereby treating the subject.

[0076] In an aspect, the invention provides a method of preventing at least one symptom in a subject having a disease or disorder that would benefit from reduction in KHK expression, the method comprising administering to the subject a prophylactically effective amount of the dsRNA agent of the invention or a pharmaceutical composition of the invention, thereby preventing at least one symptom in the subject having a disorder that would benefit from reduction in KHK expression.

[0077] In certain embodiments, the administration of the dsRNA to the subject causes a decrease in fructose metabolism. In certain embodiments, the administration of the dsRNA causes a decrease in the level of KHK in the subject, especially hepatic KHK, especially KHK-C in a subject with elevated KHK. In certain embodiments, the administration of the dsRNA causes a decrease in fructose metabolism in the subject. In certain embodiments, the administration of the dsRNA causes a decrease in the level of uric acid, e.g., serum uric acid, in a subject with elevated serum uric acid, e.g., elevated serum uric acid associated with gout. In certain embodiments, the administration of the dsRNA causes a normalization of serum lipids, e.g., triglycerides including postprandial triglycerides, LDL, HDL, or cholesterol, in a subject with at least one abnormal serum lipid level. In certain embodiments, the administration of the dsRNA causes a normalization of lipid deposition, e.g., a decrease of lipid deposition in the liver (e.g., decrease of NAFLD or NASH), a decrease of visceral fat deposition, a decrease in body weight. In certain embodiments, the administration of the dsRNA causes a normalization of insulin or glucose response in a subject with abnormal insulin response not related to an immune response to insulin, or abnormal glucose response. In certain embodiments, the administration of the dsRNA results in an improvement of kidney function, or a stoppage or reduction of the rate of loss of kidney function. In certain embodiments, the dsRNA causes a reduction of hypertension, i.e., elevated blood pressure.

[0078] In certain embodiments, the KHK-associated disease is a liver disease, e.g., fatty liver disease such as NAFLD or NASH. In certain embodiments, the KHK-associated disease is dyslipidemia, e.g., elevated serum triglycerides, elevated serum LDL, elevated serum cholesterol, lowered serum HDL, postprandial hypertriglyceridemia. In another embodiment, the KHK-associated disease is a disorder of glycemic control, e.g., insulin resistance not resulting from an immune response against insulin, glucose resistance, type 2 diabetes. In certain embodiments, the KHK-associated disease is a cardiovascular disease, e.g., hypertension, endothelial cell dysfunction. In certain embodiments, the KHK-associated disease is a kidney disease, e.g., acute kidney disorder, tubular dysfunction, proinflammatory changes to the proximal tubules, chronic kidney disease. In certain embodiments, the disease is metabolic syndrome. In certain embodiments, the KHK-associated disease is a disease of lipid deposition or dysfunction, e.g., visceral adipose deposition, fatty liver, obesity. In certain embodiments, the KHK-associated disease is a disease of elevated uric acid, e.g., gout, hyperuricemia. In certain embodiments the KHK-associated disease is an eating disorder such as excessive sugar craving.

[0079] In certain embodiments, the invention further comprises administering an additional agent to a subject with a KHK-associated disease.

[0080] In certain embodiments, treatments known in the art for the various KHK-associated diseases are used in combination with the RNAi agents of the invention. Such treatments are discussed below.

[0081] In various embodiments, the dsRNAi agent is administered to a subject at a dose of about 0.01 mg/kg to about 10 mg/kg or about 0.5 mg/kg to about 50 mg/kg. In some embodiments, the dsRNA agent is administered to a subject at a dose of about 10 mg/kg to about 30 mg/kg. In certain embodiments, the dsRNA agent is administered to a subject at a dose selected from 0.5 mg/kg 1 mg/kg, 1.5 mg/kg, 3 mg/kg, 5 mg/kg, 10 mg/kg, and 30 mg/kg. In certain embodiments, the RNAi agent is administered about once per week, once per month, once every other two months, or once a quarter (i.e., once every three months) at a dose of about 0.1 mg/kg to about 5.0 mg/kg.

[0082] In certain embodiments, the dsRNAi agent is administered to the subject once a week. In certain embodiments, the dsRNAi agent is administered to the subject once a month. In certain embodiments, the dsRNAi agent is administered to a subject once per quarter (i.e., every three months).

[0083] In some embodiments, the dsRNAi agent is administered to the subject subcutaneously.

[0084] In some embodiments, the dsRNAi agent is administered to the subject intramuscularly.

[0085] In various embodiments, the methods of the invention further comprise measuring the uric acid level, especially serum uric acid level, in the subject. In various embodiments, the methods of the invention further comprise measuring the urine fructose level in the subject. In various embodiments, the methods of the invention further comprise measuring a serum lipid level in a subject. In certain embodiments, the methods of the invention further include measuring insulin or glucose sensitivity in a subject. In certain embodiments, a decrease in the levels of expression or activity of fructose metabolism indicates that the KHK-associated disease is being treated or prevented.

### BRIEF DESCRIPTION OF THE DRAWINGS

[0086] FIG. 1 depicts the classic and alternative lipogenic pathways of fructose. In the classical pathway, triglycerides (TG) are a direct product of fructose metabolism by the action of multiple enzymes including aldolase B (Aldo B) and fatty acid synthase (FAS). In an alternative pathway, uric acid produced from the nucleotide turnover that occurs during the phosphorylation of fructose to fructose-1-phosphate (F-1-P) results in the generation of mitochondrial oxidative stress (mtROS), which causes a decrease in the activity of aconitase (ACO2) in the Krebs cycle. As a consequence, the ACO2 substrate, citrate, accumulates and is released to the cytosol where it acts as substrate for TG synthesis through the activation of ATP citrate lyase (ACL) and fatty acid synthase. AMPD2, AMP deaminase 2; IMP, inosine monophosphate; PO₄, phosphate (from Johnson et al. (2013) Diabetes. 62:3307-3315).

[0087] FIG. 2 depicts the exon arrangement on the human KHK gene for the transcript products of ketohexokinase A (NM_000221.2, SEQ ID NO: 3), ketohexokinase C (NM_006488.2, SEQ ID NO: 1) and transcript variant X5 (XM_005264298.1, SEQ ID NO: 5).

### DETAILED DESCRIPTION OF THE INVENTION

[0088] The present invention provides compositions comprising RNAi agents, e.g., double stranded iRNA agents, targeting KHK. The present invention also provides methods of using the compositions of the invention for inhibiting KHK expression and for treating KHK-associated disease, disorders, or conditions, e.g., liver disease (e.g., fatty liver, steatohepatitis, NAFLD, NASH), dyslipidemia (e.g., hyperlipidemia, high LDL cholesterol, low HDL cholesterol, hypertriglyceridemia, postprandial hypertriglyceridemia), disorders of glycemic control (e.g., insulin resistance not due to an immune response to insulin, type 2 diabetes), cardiovascular disease (e.g., hypertension, endothelial cell dysfunction), kidney disease (e.g., acute kidney disorder, tubular dysfunction, proinflammatory changes to the proximal tubules, chronic kidney disease), metabolic syndrome, adipocyte dysfunction, visceral adipose deposition, obesity, hyperuricemia, gout, eating disorders, and excessive sugar craving (Khaitan Z. et al., (2013) J. Nutr. Metab., Article ID 682673, 1-12; Diggle C. P. et al., (2009) J. Hisotchem. Cytochem., 57(8): 763-774; Cirillo P. et al., (2009) J. Am. Soc. Nephrol., 20: 545-553; Lanaspa M. A. et al., (2012) PLOS ONE 7(10): 1-11).

[0089] The KHK (Ketohexokinase) gene is located on chromosome 2p23 and encodes ketohexokinase, also known as fructokinase. KHK is a phosphotransferase enzyme with an alcohol as the phosphate acceptor. KHK belongs to the ribokinase family of carbohydrate kinases (Trinh et al., ACTA Cryst., D65: 201-211). Two isoforms of ketohexokinase have been identified, KHK-A and KHK-C, that result from alternative splicing of the full length mRNA. These isoforms differ by inclusion of either exon 3a or 3c, and differ by 32 amino acids between positions 72 and 115 (see, e.g., FIG. 2). KHK-C mRNA is expressed at high levels, predominantly in the liver, kidney and small intestine. KHK-C has a much lower Kₘ for fructose binding than KHK-A, and as a result, is highly effective in phosphorylating dietary fructose. The sequence of a human KHK-C mRNA transcript may be found at, for example, GenBank Accession No. GI: 153218447 (NM_006488.2; SEQ ID NO:1). The sequence of a human KHK-A mRNA transcript may be found at, for example GenBank Accession No. GI: 153218446 (NM_000221.2; SEQ ID NO:3). The sequence of full-length human KHK mRNA is provided in GenBank Accession No. GI: 530367552 (XM_005264298.1; SEQ ID NO:5) was used (FIG. 2).

[0090] The present invention provides iRNA agents, compositions and methods for modulating the expression of a KHK gene. In certain embodiments, expression of KHK is reduced using a KHK-specific iRNA agent, thereby leading to a decrease in the phosphorylation of fructose to fructose-1-phosphate and thereby preventing an increase in uric acid levels and an increase in lipogenesis resulting from metabolism through the fructose metabolic pathway. Thus, inhibition of KHK gene expression or activity using the iRNA compositions of the invention is useful as a therapy to reduce the lipogenic effects of dietary fructose and prevent the concomitant accumulation of uric acid in a subject. Such inhibition is useful for treating diseases, disorders, or conditions such as liver disease (e.g., fatty liver, steatohepatitis, NAFLD, NASH), dyslipidemia (e.g., hyperlipidemia, high LDL cholesterol, low HDL cholesterol, hypertriglyceridemia, postprandial hypertriglyceridemia), disorders of glycemic control (e.g., insulin resistance, diabetes), cardiovascular disease (e.g., hypertension, endothelial cell dyfunction), kidney disease (e.g., acute kidney disorder, tubular dysfunction, proinflammatory changes to the proximal tubules, chronic kidney disease), metabolic syndrome, adiocyte dysfunction, visceral adipose deposition, obesity, hyperuricemia, gout, eating disorders, and excessive sugar craving.

[0091] The present invention provides iRNA compositions which affect the RNA-induced silencing complex (RISC)-mediated cleavage of RNA transcripts of a ketohexokinase (KHK) gene. The gene may be within a cell, e.g., a cell within a subject, such as a human. The use of these iRNAs enables the targeted degradation of mRNAs of the corresponding gene (KHK gene) in mammals.

[0092] The iRNAs of the invention have been designed to target the human KHK gene, including portions of the gene that are conserved in the KHK orthologs of other mammalian species. Without intending to be limited by theory, it is believed that a combination or sub-combination of the foregoing properties and the specific target sites or the specific modifications in these iRNAs confer to the iRNAs of the invention improved efficacy, stability, potency, durability, and safety.

[0093] Accordingly, the present invention also provides methods for treating a subject having a disorder that would benefit from inhibiting or reducing the expression of a KHK gene, e.g., a KHK-associated disease, using iRNA compositions which effect the RNA-induced silencing complex (RISC)-mediated cleavage of RNA transcripts of a KHK gene.

[0094] Very low dosages of the iRNAs of the invention, in particular, can specifically and efficiently mediate RNA interference (RNAi), resulting in significant inhibition of expression of the corresponding gene (KHK gene).

[0095] The iRNAs of the invention may include an RNA strand (the antisense strand) having a region which is about 30 nucleotides or less in length, e.g., 15-30, 15-29, 15-28, 15-27, 15-26, 15-25, 15-24, 15-23, 15-22, 15-21, 15-20, 15-19, 15-18, 15-17, 18-30, 18-29, 18-28, 18-27, 18-26, 18-25, 18-24, 18-23, 18-22, 18-21, 18-20, 19-30, 19-29, 19-28, 19-27, 19-26, 19-25, 19-24, 19-23, 19-22, 19-21, 19-20, 20-30, 20-29, 20-28, 20-27, 20-26, 20-25, 20-24,20-23, 20-22, 20-21, 21-30, 21-29, 21-28, 21-27, 21-26, 21-25, 21-24, 21-23, or 21-22 nucleotides in length, which region is substantially complementary to at least part of an mRNA transcript of a KHK gene.

[0096] In certain embodiments, the iRNAs of the invention include an RNA strand (the antisense strand) which can include longer lengths, for example up to 66 nucleotides, e.g., 36-66, 26-36, 25-36, 31-60, 22-43, 27-53 nucleotides in length with a region of at least 19 contiguous nucleotides that is substantially complementary to at least a part of an mRNA transcript of a KHK gene. These iRNAs with the longer length antisense strands preferably include a second RNA strand (the sense strand) of 20-60 nucleotides in length wherein the sense and antisense strands form a duplex of 18-30 contiguous nucleotides.

[0097] The use of the iRNAs of the invention enables the targeted degradation of mRNAs of the corresponding gene (KHK gene) in mammals. Very low dosages of the iRNAs of the invention, in particular, can specifically and efficiently mediate RNA interference (RNAi), resulting in significant inhibition of expression of the corresponding gene (KHK gene). Using in vitro and in vivo assays, the present inventors have demonstrated that iRNAs targeting a KHK gene can mediate RNAi, resulting in significant inhibition of expression of KHK, as well as reducing fructose metabolism which will decrease one or more of the symptoms associated with a KHK-associated disease. Thus, methods and compositions including these iRNAs are useful for treating a subject having a KHK-associated disease. The methods and compostions herein are useful for reducing the level of KHK in a subject, preferably KHK-C in a subject e.g., hepatic KHK-C in a subject.

[0098] The following detailed description discloses how to make and use compositions containing iRNAs to inhibit the expression of a KHK gene as well as compositions, uses, and methods for treating subjects having diseases and disorders that would benefit from reduction of the expression of a KHK gene.

### I. Definitions

[0099] In order that the present invention may be more readily understood, certain terms are first defined. In addition, it should be noted that whenever a value or range of values of a parameter are recited, it is intended that values and ranges intermediate to the recited values are also intended to be part of this invention.

[0100] The articles “a” and “an” are used herein to refer to one or to more than one (i.e., to at least one) of the grammatical object of the article. By way of example, “an element” means one element or more than one element, e.g., a plurality of elements.

[0101] The term “including” is used herein to mean, and is used interchangeably with, the phrase “including but not limited to”.

[0102] The term “or” is used herein to mean, and is used interchangeably with, the term “and/or,” unless context clearly indicates otherwise. For example, “sense strand or antisense strand” is understood as “sense strand or antisense strand or sense strand and antisense strand.”

[0103] The term “about” is used herein to mean within the typical ranges of tolerances in the art. For example, “about” can be understood as about 2 standard deviations from the mean. In certain embodiments, about means±10%. In certain embodiments, about means±5%. When about is present before a series of numbers or a range, it is understood that “about” can modify each of the numbers in the series or range.

[0104] The term “at least” prior to a number or series of numbers is understood to include the number adjacent to the term “at least”, and all subsequent numbers or integers that could logically be included, as clear from context. For example, the number of nucleotides in a nucleic acid molecule must be an integer. For example, “at least 18 nucleotides of a 21 nucleotide nucleic acid molecule” means that 18, 19, 20, or 21 nucleotides have the indicated property. When at least is present before a series of numbers or a range, it is understood that “at least” can modify each of the numbers in the series or range.

[0105] As used herein, “no more than” or “less than” is understood as the value adjacent to the phrase and logical lower values or integers, as logical from context, to zero. For example, a duplex with an overhang of “no more than 2 nucleotides” has a 2, 1, or 0 nucleotide overhang. When “no more than” is present before a series of numbers or a range, it is understood that “no more than” can modify each of the numbers in the series or range.

[0106] As used herein, “ketohexokinase” or “KHK” is an enzyme that catalyzes conversion of fructose to fructose-1-phosphate. The product of this gene is the first enzyme in the pathway that catabolizes dietary fructose. Alternatively spliced transcript variants encoding different isoforms have been identified. The gene is also known as fructokinase. Further information on KHK is provided, for example, in the NCBI Gene database at www.ncbi.nlm.nih.gov/gene/3975 (which is incorporated herein by reference as of the date of filing this application).

[0107] As used herein, “ketohexokinase,” used interchangeably with the term “KHK,” refers to the naturally occurring gene that encodes a KHK protein. The amino acid and complete coding sequences of the reference sequence of the human KHK gene may be found in, for example, GenBank Accession No. GI: 153218447 (RefSeq Accession No. NM_006488; SEQ ID NO:1; SEQ ID NO:2), GenBank Accession No. GI: 153218446 (RefSeq Accession No. NM_000221.2; SEQ ID NO: 3 and 4), and GenBank Accession No. 767914480 (RefSeq Accession No. XM_005264298.2; SEQ ID NO: 5 and 6). Mammalian orthologs of the human KHK gene may be found in, for example, GI: 887209819 (RefSeq Accession No. NM_008439.4, mouse; SEQ ID NO:7 and SEQ ID NO:8); GI: 126432547 (RefSeq Accession No. NM_031855.3, rat; SEQ ID NO:9 and SEQ ID NO:10); GenBank Accession Nos. GI: 982291245 (RefSeq Accession No. XM_005576321, cynomolgus monkey; SEQ ID NO:11 and SEQ ID NO:12).

[0108] There are two KHK isoforms produced by alternative splicing of the KHK pre-mRNA. KHK-C is abundant in fructose metabolizing organs, e.g., liver, kidney, and intestines. It is highly active and responsible for most fructose metabolism. KHK-A has a lower affinity to fructose and is widely expressed in most tissues. The iRNA agents provided herein can be capable of silencing one or both KHK isoforms. In preferred embodiments, the iRNA agent is capable of silencing at least KHK-C and expression of at least the KHK-C isoform is inhibited.

[0109] A number of naturally occurring SNPs are known and can be found, for example, in the SNP database at the NCBI at www.ncbi.nlm.nih.gov/SNP/snp_ref.cgi?locusId=3795 (which is incorporated herein by reference as of the date of filing this application) which provides SNPs in human KHK. In preferred embodiments, such naturally occurring variants are included within the scope of the KHK gene sequence.

[0110] Additional examples of KHK mRNA sequences are readily available using publicly available databases, e.g., GenBank, UniProt, and OMIM.

[0111] As used herein, “target sequence” refers to a contiguous portion of the nucleotide sequence of an mRNA molecule formed during the transcription of a KHK gene, including mRNA that is a product of RNA processing of a primary transcription product. The target portion of the sequence will be at least long enough to serve as a substrate for iRNA-directed cleavage at or near that portion of the nucleotide sequence of an mRNA molecule formed during the transcription of a KHK gene. In one embodiment, the target sequence is within the protein coding region of KHK.

[0112] The target sequence may be from about 9-36 nucleotides in length, e.g., about 15-30 nucleotides in length. For example, the target sequence can be from about 15-30 nucleotides, 15-29, 15-28, 15-27, 15-26, 15-25, 15-24, 15-23, 15-22, 15-21, 15-20, 15-19, 15-18, 15-17, 18-30, 18-29, 18-28, 18-27, 18-26, 18-25, 18-24, 18-23, 18-22, 18-21, 18-20, 19-30, 19-29, 19-28, 19-27, 19-26, 19-25, 19-24, 19-23, 19-22, 19-21, 19-20, 20-30, 20-29, 20-28, 20-27, 20-26, 20-25, 20-24,20-23, 20-22, 20-21, 21-30, 21-29, 21-28, 21-27, 21-26, 21-25, 21-24, 21-23, or 21-22 nucleotides in length. Ranges and lengths intermediate to the above recited ranges and lengths are also contemplated to be part of the invention.

[0113] As used herein, the term “strand comprising a sequence” refers to an oligonucleotide comprising a chain of nucleotides that is described by the sequence referred to using the standard nucleotide nomenclature.

[0114] “G,” “C,” “A,” “T,” and “U” each generally stand for a nucleotide that contains guanine, cytosine, adenine, thymidine, and uracil as a base, respectively. However, it will be understood that the term “ribonucleotide” or “nucleotide” can also refer to a modified nucleotide, as further detailed below, or a surrogate replacement moiety (see, e.g., Table 2). The skilled person is well aware that guanine, cytosine, adenine, and uracil can be replaced by other moieties without substantially altering the base pairing properties of an oligonucleotide comprising a nucleotide bearing such replacement moiety. For example, without limitation, a nucleotide comprising inosine as its base can base pair with nucleotides containing adenine, cytosine, or uracil. Hence, nucleotides containing uracil, guanine, or adenine can be replaced in the nucleotide sequences of dsRNA featured in the invention by a nucleotide containing, for example, inosine. In another example, adenine and cytosine anywhere in the oligonucleotide can be replaced with guanine and uracil, respectively to form G-U Wobble base pairing with the target mRNA. Sequences containing such replacement moieties are suitable for the compositions and methods featured in the invention.

[0115] The terms “iRNA”, “RNAi agent,” “iRNA agent,”, “RNA interference agent” as used interchangeably herein, refer to an agent that contains RNA as that term is defined herein, and which mediates the targeted cleavage of an RNA transcript via an RNA-induced silencing complex (RISC) pathway. iRNA directs the sequence-specific degradation of mRNA through a process known as RNA interference (RNAi). The iRNA modulates, e.g., inhibits, the expression of a KHK gene in a cell, e.g., a cell within a subject, such as a mammalian subject.

[0116] In one embodiment, an RNAi agent of the invention includes a single stranded RNA that interacts with a target RNA sequence, e.g., a KHK target mRNA sequence, to direct the cleavage of the target RNA. Without wishing to be bound by theory it is believed that long double stranded RNA introduced into cells is broken down into siRNA by a Type III endonuclease known as Dicer (Sharp et al. (2001) Genes Dev. 15:485). Dicer, a ribonuclease-III-like enzyme, processes the dsRNA into 19-23 base pair short interfering RNAs with characteristic two base 3′ overhangs (Bernstein, et al., (2001) Nature 409:363). The siRNAs are then incorporated into an RNA-induced silencing complex (RISC) where one or more helicases unwind the siRNA duplex, enabling the complementary antisense strand to guide target recognition (Nykanen, et al., (2001) Cell 107:309). Upon binding to the appropriate target mRNA, one or more endonucleases within the RISC cleave the target to induce silencing (Elbashir, et al., (2001) Genes Dev. 15:188). Thus, in one aspect the invention relates to a single stranded RNA (siRNA) generated within a cell and which promotes the formation of a RISC complex to effect silencing of the target gene, i.e., a KHK gene. Accordingly, the term “siRNA” is also used herein to refer to an iRNA as described above.

[0117] In certain embodiments, the RNAi agent may be a single-stranded siRNA (ssRNAi) that is introduced into a cell or organism to inhibit a target mRNA. Single-stranded RNAi agents bind to the RISC endonuclease, Argonaute 2, which then cleaves the target mRNA. The single-stranded siRNAs are generally 15-30 nucleotides and are chemically modified. The design and testing of single-stranded siRNAs are described in U.S. Pat. No. 8,101,348 and in Lima et al., (2012) Cell 150:883-894, the entire contents of each of which are hereby incorporated herein by reference. Any of the antisense nucleotide sequences described herein may be used as a single-stranded siRNA as described herein or as chemically modified by the methods described in Lima et al., (2012) Cell 150:883-894.

[0118] In certain embodiments, an “iRNA” for use in the compositions, uses, and methods of the invention is a double stranded RNA and is referred to herein as a “double stranded RNAi agent,” “double stranded RNA (dsRNA) molecule,” “dsRNA agent,” or “dsRNA”. The term “dsRNA”, refers to a complex of ribonucleic acid molecules, having a duplex structure comprising two anti-parallel and substantially complementary nucleic acid strands, referred to as having “sense” and “antisense” orientations with respect to a target RNA, i.e., a KHK gene. In some embodiments of the invention, a double stranded RNA (dsRNA) triggers the degradation of a target RNA, e.g., an mRNA, through a post-transcriptional gene-silencing mechanism referred to herein as RNA interference or RNAi.

[0119] In general, the majority of nucleotides of each strand of a dsRNA molecule are ribonucleotides, but as described in detail herein, each or both strands can also include one or more non-ribonucleotides, e.g., a deoxyribonucleotide or a modified nucleotide. In addition, as used in this specification, an “iRNA” may include ribonucleotides with chemical modifications; an iRNA may include substantial modifications at multiple nucleotides. As used herein, the term “modified nucleotide” refers to a nucleotide having, independently, a modified sugar moiety, a modified internucleotide linkage, or modified nucleobase, or any combination thereof. Thus, the term modified nucleotide encompasses substitutions, additions or removal of, e.g., a functional group or atom, to internucleoside linkages, sugar moieties, or nucleobases. The modifications suitable for use in the agents of the invention include all types of modifications disclosed herein or known in the art. Any such modifications, as used in a siRNA type molecule, are encompassed by “iRNA” or “RNAi agent” for the purposes of this specification and claims.

[0120] The majority of nucleotides of each strand of a dsRNA molecule may be ribonucleotides, but as described in detail herein, each or both strands can also include one or more non-ribonucleotides, e.g., a deoxyribonucleotide or a modified nucleotide. In addition, as used in this specification, an “iRNA” may include ribonucleotides with chemical modifications; an iRNA agent may include substantial modifications at multiple nucleotides. As used herein, the term “modified nucleotide” refers to a nucleotide having, independently, a modified sugar moiety, a modified internucleotide linkage, or modified nucleobase. Thus, the term modified nucleotide encompasses substitutions, additions or removal of, e.g., a functional group or atom, to internucleoside linkages, sugar moieties, or nucleobases. The modifications suitable for use in the agents of the invention include all types of modifications disclosed herein or known in the art. Any such modifications, as used in a siRNA type molecule, are encompassed by “iRNA” or “RNAi agent” for the purposes of this specification and claims.

[0121] The duplex region may be of any length that permits specific degradation of a desired target RNA through a RISC pathway, and may range from about 9 to 36 base pairs in length, e.g., about 15-30 base pairs in length, for example, about 9, 10, 11, 12, 13, 14, 15, 16, 17, 18, 19, 20, 21, 22, 23, 24, 25, 26, 27, 28, 29, 30, 31, 32, 33, 34, 35, or 36 base pairs in length, such as about 15-30, 15-29, 15-28, 15-27, 15-26, 15-25, 15-24, 15-23, 15-22, 15-21, 15-20, 15-19, 15-18, 15-17, 18-30, 18-29, 18-28, 18-27, 18-26, 18-25, 18-24, 18-23, 18-22, 18-21, 18-20, 19-30, 19-29, 19-28, 19-27, 19-26, 19-25, 19-24, 19-23, 19-22, 19-21, 19-20, 20-30, 20-29, 20-28, 20-27, 20-26, 20-25, 20-24,20-23, 20-22, 20-21, 21-30, 21-29, 21-28, 21-27, 21-26, 21-25, 21-24, 21-23, or 21-22 base pairs in length. Ranges and lengths intermediate to the above recited ranges and lengths are also contemplated to be part of the invention.

[0122] The two strands forming the duplex structure may be different portions of one larger RNA molecule, or they may be separate RNA molecules. Where the two strands are part of one larger molecule, and therefore are connected by an uninterrupted chain of nucleotides between the 3′-end of one strand and the 5′-end of the respective other strand forming the duplex structure, the connecting RNA chain is referred to as a “hairpin loop.” A hairpin loop can comprise at least one unpaired nucleotide. In some embodiments, the hairpin loop can comprise at least 2, 3, 4, 5, 6, 7, 8, 9, 10, 20, 23 or more unpaired nucleotides. In some embodiments, the hairpin loop can be 10 or fewer nucleotides. In some embodiments, the hairpin loop can be 8 or fewer unpaired nucleotides. In some embodiments, the hairpin loop can be 4-10 unpaired nucleotides. In some embodiments, the hairpin loop can be 4-8 nucleotides.

[0123] Where the two substantially complementary strands of a dsRNA are comprised by separate RNA molecules, those molecules need not, but can be covalently connected. Where the two strands are connected covalently by means other than an uninterrupted chain of nucleotides between the 3′-end of one strand and the 5′-end of the respective other strand forming the duplex structure, the connecting structure is referred to as a “linker.” The RNA strands may have the same or a different number of nucleotides. The maximum number of base pairs is the number of nucleotides in the shortest strand of the dsRNA minus any overhangs that are present in the duplex. In addition to the duplex structure, an RNAi may comprise one or more nucleotide overhangs.

[0124] In certain embodiments, an iRNA agent of the invention is a dsRNA, each strand of which comprises 19-23 nucleotides, that interacts with a target RNA sequence, e.g., a KHK gene, without wishing to be bound by theory, long double stranded RNA introduced into cells is broken down into siRNA by a Type III endonuclease known as Dicer (Sharp et al. (2001) Genes Dev. 15:485). Dicer, a ribonuclease-III-like enzyme, processes the dsRNA into 19-23 base pair short interfering RNAs with characteristic two base 3′ overhangs (Bernstein, et al., (2001) Nature 409:363). The siRNAs are then incorporated into an RNA-induced silencing complex (RISC) where one or more helicases unwind the siRNA duplex, enabling the complementary antisense strand to guide target recognition (Nykanen, et al., (2001) Cell 107:309). Upon binding to the appropriate target mRNA, one or more endonucleases within the RISC cleave the target to induce silencing (Elbashir, et al., (2001) Genes Dev. 15:188).

[0125] In some embodiments, an iRNA of the invention is a dsRNA of 24-30 nucleotides that interacts with a target RNA sequence, e.g., a KHK target mRNA sequence, to direct the cleavage of the target RNA. Without wishing to be bound by theory, long double stranded RNA introduced into cells is broken down into siRNA by a Type III endonuclease known as Dicer (Sharp et al. (2001) Genes Dev. 15:485). Dicer, a ribonuclease-III-like enzyme, processes the dsRNA into 19-23 base pair short interfering RNAs with characteristic two base 3′ overhangs (Bernstein, et al., (2001) Nature 409:363). The siRNAs are then incorporated into an RNA-induced silencing complex (RISC) where one or more helicases unwind the siRNA duplex, enabling the complementary antisense strand to guide target recognition (Nykanen, et al., (2001) Cell 107:309). Upon binding to the appropriate target mRNA, one or more endonucleases within the RISC cleave the target to induce silencing (Elbashir, et al., (2001) Genes Dev. 15:188).

[0126] As used herein, the term “nucleotide overhang” refers to at least one unpaired nucleotide that protrudes from the duplex structure of a double strained iRNA. For example, when a 3′-end of one strand of a dsRNA extends beyond the 5′-end of the other strand, or vice versa, there is a nucleotide overhang. A dsRNA can comprise an overhang of at least one nucleotide; alternatively the overhang can comprise at least two nucleotides, at least three nucleotides, at least four nucleotides, at least five nucleotides or more. A nucleotide overhang can comprise or consist of a nucleotide/nucleoside analog, including a deoxynucleotide/nucleoside. The overhang(s) can be on the sense strand, the antisense strand, or any combination thereof. Furthermore, the nucleotide(s) of an overhang can be present on the 5′-end, 3′-end, or both ends of either an antisense or sense strand of a dsRNA.

[0127] In certain embodiments, the antisense strand of a dsRNA has a 1-10 nucleotide, e.g., a 1, 2, 3, 4, 5, 6, 7, 8, 9, or 10 nucleotide, overhang at the 3′-end or the 5′-end. In certain embodiments, the overhang on the sense strand or the antisense strand, or both, can include extended lengths longer than 10 nucleotides, e.g., 1-30 nucleotides, 2-30 nucleotides, 10-30 nucleotides, or 10-15 nucleotides in length. In certain embodiments, the extended overhang can include a self complementary portion, i.e., the overhang is capable of forming a stable hairpin structure, e.g., a duplex of at least 3 nucleotides, or a duplex of at least four nucleotides. In certain embodiments, an extended overhang is on the sense strand of the duplex. In certain embodiments, an extended overhang is present on the 3′end of the sense strand of the duplex. In certain embodiments, an extended overhang is present on the 5′end of the sense strand of the duplex. In certain embodiments, an extended overhang is on the antisense strand of the duplex. In certain embodiments, an extended overhang is present on the 3′end of the antisense strand of the duplex. In certain embodiments, an extended overhang is present on the 5′end of the antisense strand of the duplex. In certain embodiments, one or more of the nucleotides in the overhang is replaced with a nucleoside thiophosphate. In certain embodiments, the overhang includes a self-complementary portion such that the overhang is capable of forming a hairpin structure that is stable under physiological conditions.

[0128] “Blunt” or “blunt end” means that there are no unpaired nucleotides at that end of the double stranded RNAi agent, i.e., no nucleotide overhang. A “blunt ended” double stranded RNAi agent is double stranded over its entire length, i.e., no nucleotide overhang at either end of the molecule. The RNAi agents of the invention include RNAi agents with no nucleotide overhang at one end (i.e., agents with one overhang and one blunt end) or with no nucleotide overhangs at either end.

[0129] The term “antisense strand” or “guide strand” refers to the strand of an iRNA, e.g., a dsRNA, which includes a region that is substantially complementary to a target sequence, e.g., a KHK mRNA. As used herein, the term “region of complementarity” refers to the region on the antisense strand that is substantially complementary to a sequence, for example a target sequence, e.g., a KHK nucleotide sequence, as defined herein. Where the region of complementarity is not fully complementary to the target sequence, the mismatches can be in the internal or terminal regions of the molecule. Generally, the most tolerated mismatches are in the terminal regions, e.g., within 5, 4, 3, 2, or 1 nucleotides of the 5′- or 3′-end of the iRNA. In some embodiments, a double stranded RNAi agent of the invention includes a nucleotide mismatch in the antisense strand. In some embodiments, a double stranded RNAi agent of the invention includes a nucleotide mismatch in the sense strand. In some embodiments, the nucleotide mismatch is, for example, within 5, 4, 3, 2, or 1 nucleotides from the 3′-end of the iRNA. In another embodiment, the nucleotide mismatch is, for example, in the 3′-terminal nucleotide of the iRNA.

[0130] The term “sense strand” or “passenger strand” as used herein, refers to the strand of an iRNA that includes a region that is substantially complementary to a region of the antisense strand as that term is defined herein.

[0131] As used herein, “substantially all of the nucleotides are modified” are largely but not wholly modified and can include not more than 5, 4, 3, 2, or 1 unmodified nucleotides.

[0132] As used herein, the term “cleavage region” refers to a region that is located immediately adjacent to the cleavage site. The cleavage site is the site on the target at which cleavage occurs. In some embodiments, the cleavage region comprises three bases on either end of, and immediately adjacent to, the cleavage site. In some embodiments, the cleavage region comprises two bases on either end of, and immediately adjacent to, the cleavage site. In some embodiments, the cleavage site specifically occurs at the site bound by nucleotides 10 and 11 of the antisense strand, and the cleavage region comprises nucleotides 11, 12 and 13.

[0133] As used herein, and unless otherwise indicated, the term “complementary,” when used to describe a first nucleotide sequence in relation to a second nucleotide sequence, refers to the ability of an oligonucleotide or polynucleotide comprising the first nucleotide sequence to hybridize and form a duplex structure under certain conditions with an oligonucleotide or polynucleotide comprising the second nucleotide sequence, as will be understood by the skilled person. Such conditions can, for example, be stringent conditions, where stringent conditions can include: 400 mM NaCl, 40 mM PIPES pH 6.4, 1 mM EDTA, 50° C. or 70° C. for 12-16 hours followed by washing (see, e.g., “Molecular Cloning: A Laboratory Manual, Sambrook, et al. (1989) Cold Spring Harbor Laboratory Press). Other conditions, such as physiologically relevant conditions as can be encountered inside an organism, can apply. The skilled person will be able to determine the set of conditions most appropriate for a test of complementarity of two sequences in accordance with the ultimate application of the hybridized nucleotides.

[0134] Complementary sequences within an iRNA, e.g., within a dsRNA as described herein, include base-pairing of the oligonucleotide or polynucleotide comprising a first nucleotide sequence to an oligonucleotide or polynucleotide comprising a second nucleotide sequence over the entire length of one or both nucleotide sequences. Such sequences can be referred to as “fully complementary” with respect to each other herein. However, where a first sequence is referred to as “substantially complementary” with respect to a second sequence herein, the two sequences can be fully complementary, or they can form one or more, but generally not more than 5, 4, 3, or 2 mismatched base pairs upon hybridization for a duplex up to 30 base pairs, while retaining the ability to hybridize under the conditions most relevant to their ultimate application, e.g., inhibition of gene expression via a RISC pathway. However, where two oligonucleotides are designed to form, upon hybridization, one or more single stranded overhangs, such overhangs shall not be regarded as mismatches with regard to the determination of complementarity. For example, a dsRNA comprising one oligonucleotide 21 nucleotides in length and another oligonucleotide 23 nucleotides in length, wherein the longer oligonucleotide comprises a sequence of 21 nucleotides that is fully complementary to the shorter oligonucleotide, can yet be referred to as “fully complementary” for the purposes described herein.

[0135] “Complementary” sequences, as used herein, can also include, or be formed entirely from, non-Watson-Crick base pairs or base pairs formed from non-natural and modified nucleotides, in so far as the above requirements with respect to their ability to hybridize are fulfilled. Such non-Watson-Crick base pairs include, but are not limited to, G:U Wobble or Hoogstein base pairing.

[0136] The terms “complementary,” “fully complementary,” and “substantially complementary” herein can be used with respect to the base matching between the sense strand and the antisense strand of a dsRNA, or between the antisense strand of a double stranded RNAi agent and a target sequence, as will be understood from the context of their use.

[0137] As used herein, a polynucleotide that is “substantially complementary to at least part of” a messenger RNA (mRNA) refers to a polynucleotide that is substantially complementary to a contiguous portion of the mRNA of interest (e.g., an mRNA encoding a KHK gene). For example, a polynucleotide is complementary to at least a part of a KHK mRNA if the sequence is substantially complementary to a non-interrupted portion of an mRNA encoding a KHK gene.

[0138] Accordingly, in some embodiments, the antisense polynucleotides disclosed herein are fully complementary to the target KHK sequence. In other embodiments, the antisense polynucleotides disclosed herein are substantially complementary to the target KHK sequence and comprise a contiguous nucleotide sequence which is at least about 80% complementary over its entire length to the equivalent region of the nucleotide sequence of any one of SEQ ID NOs:1, 3, 5, 7, 9, and 11, preferably of SEQ ID NOs: 1, 3, and 5, or a fragment of any one of SEQ ID NOs:1, 3, 5, 7, 9, and 11, preferably of SEQ ID NOs: 1, 3, and 5, such as at least 85%, 86%, 87%, 88%, 89%, about 90%, 91%, 92%, 93%, 94%, 95%, 96%, 97%, 98%, or 99% complementary or 100% complementary.

[0139] In one embodiment, an RNAi agent of the invention includes a sense strand that is substantially complementary to an antisense polynucleotide which, in turn, is complementary to a target KHK sequence and comprises a contiguous nucleotide sequence which is at least about 80% complementary over its entire length to any one of the sense strand nucleotide sequences in any one of Tables Table 3 or Table 5, or a fragment of any one of the sense strands in Table 3 or Table 5, such as about 85%, 86%, 87%, 88%, 89%, 90%, 91%, 92%, 93%, 94%, 95%, 96%, 97%, 98%, or 99% complementary, or 100% complementary.

[0140] In some embodiments, an iRNA of the invention includes an antisense strand that is substantially complementary to the target KHK sequence and comprises a contiguous nucleotide sequence which is at least about 80% complementary over its entire length to the equivalent region of the nucleotide sequence of any one of the antisense strands in Table 3 or 5, or a fragment of any one of the antisense strands in Table 3 or 5, such as about about 85%, 86%, 87%, 88%, 89%, 90%, 91%, 92%, 93%, 94%, 95%, 96%, 97%, 98%, or 99% complementary, or 100% complementary.

[0141] In general, the majority of nucleotides of each strand are ribonucleotides, but as described in detail herein, each or both strands can also include one or more non-ribonucleotides, e.g., a deoxyribonucleotide or a modified nucleotide. In addition, an “iRNA” may include ribonucleotides with chemical modifications. Such modifications may include all types of modifications disclosed herein or known in the art. Any such modifications, as used in an dsRNA molecule, are encompassed by “iRNA” for the purposes of this specification and claims.

[0142] In an aspect of the invention, an agent for use in the methods and compositions of the invention is a single-stranded antisense oligonucleotide molecule that inhibits a target mRNA via an antisense inhibition mechanism. The single-stranded antisense oligonucleotide molecule is complementary to a sequence within the target mRNA. The single-stranded antisense oligonucleotides can inhibit translation in a stoichiometric manner by base pairing to the mRNA and physically obstructing the translation machinery, see Dias, N. et al., (2002) Mol Cancer Ther 1:347-355. The single-stranded antisense oligonucleotide molecule may be about 14 to about 30 nucleotides in length and have a sequence that is complementary to a target sequence. For example, the single-stranded antisense oligonucleotide molecule may comprise a sequence that is at least about 14, 15, 16, 17, 18, 19, 20, or more contiguous nucleotides from any one of the antisense sequences described herein.

[0143] The phrase “contacting a cell with an iRNA,” such as a dsRNA, as used herein, includes contacting a cell by any possible means. Contacting a cell with an iRNA includes contacting a cell in vitro with the iRNA or contacting a cell in vivo with the iRNA. The contacting may be done directly or indirectly. Thus, for example, the iRNA may be put into physical contact with the cell by the individual performing the method, or alternatively, the iRNA may be put into a situation that will permit or cause it to subsequently come into contact with the cell.

[0144] Contacting a cell in vitro may be done, for example, by incubating the cell with the iRNA. Contacting a cell in vivo may be done, for example, by injecting the iRNA into or near the tissue where the cell is located, or by injecting the iRNA into another area, e.g., the bloodstream or the subcutaneous space, such that the agent will subsequently reach the tissue where the cell to be contacted is located. For example, the iRNA may contain or be coupled to a ligand, e.g., a GalNAc, e.g., GalNAc3, that directs the iRNA to a site of interest, e.g., the liver. Combinations of in vitro and in vivo methods of contacting are also possible. For example, a cell may also be contacted in vitro with an iRNA and subsequently transplanted into a subject.

[0145] In certain embodiments, contacting a cell with an iRNA includes “introducing” or “delivering the iRNA into the cell” by facilitating or effecting uptake or absorption into the cell. Absorption or uptake of an iRNA can occur through unaided diffusion or active cellular processes, or by auxiliary agents or devices. Introducing an iRNA into a cell may be in vitro or in vivo. For example, for in vivo introduction, iRNA can be injected into a tissue site or administered systemically. In vivo delivery can also be done by a beta-glucan delivery system, such as those described in U.S. Pat. Nos. 5,032,401 and 5,607,677, and US Publication No. 2005/0281781, the entire contents of which are hereby incorporated herein by reference. In vitro introduction into a cell includes methods known in the art such as electroporation and lipofection. Further approaches are described herein below or are known in the art.

[0146] The term “lipid nanoparticle” or “LNP” is a vesicle comprising a lipid layer encapsulating a pharmaceutically active molecule, such as a nucleic acid molecule, e.g., an iRNA or a plasmid from which an iRNA is transcribed. LNPs are described in, for example, U.S. Pat. Nos. 6,858,225, 6,815,432, 8,158,601, and 8,058,069, the entire contents of which are hereby incorporated herein by reference.

[0147] As used herein, a “subject” is an animal, such as a mammal, including a primate (such as a human, a non-human primate, e.g., a monkey, and a chimpanzee), a non-primate (such as a cow, a pig, a camel, a llama, a horse, a goat, a rabbit, a sheep, a hamster, a guinea pig, a cat, a dog, a rat, a mouse, a horse, and a whale), or a bird (e.g., a duck or a goose) that expresses the target gene, either endogenously or heterologously. In certain embodiments, the subject is a human, such as a human being treated or assessed for a disease, disorder, or condition that would benefit from reduction in KHK gene expression or replication; a human at risk for a disease, disorder, or condition that would benefit from reduction in KHK gene expression; a human having a disease, disorder, or condition that would benefit from reduction in KHK gene expression; or human being treated for a disease, disorder or condition that would benefit from reduction in KHK gene expression, as described herein. In some embodiments, the subject is a female human. In other embodiments, the subject is a male human.

[0148] As used herein, the terms “treating” or “treatment” refer to a beneficial or desired result including, but not limited to, alleviation or amelioration of one or more signs or symptoms associated with KHK gene expression or KHK protein production, especially elevated KHK gene expression or elevated KHK protein production. “Treatment” can also mean prolonging survival as compared to expected survival in the absence of treatment.

[0149] The term “lower” in the context of the level of KHK gene expression or KHK protein production in a subject, or a disease marker or symptom refers to a statistically significant decrease in such level. The decrease can be, for example, at least 20%, 25%, 30%, 35%, 40%, 45%, 50%, 55%, 60%, 65%, 70%, 75%, 80%, 85%, 90%, or 95%, or below the level of detection for the detection method. In certain embodiments, the expression of the target is normalized, i.e., decreased towards or to a level accepted as within the range of normal for an individual without such disorder, e.g., normalization of body weight, blood pressure, or a serum lipid level. As used here, “lower” in a subject can refer to lowering of gene expression or protein production in a cell in a subject does not require lowering of expression in all cells or tissues of a subject. For example, as used herein, lowering in a subject can include lowering of gene expression or protein production in the liver of a subject.

[0150] The term “lower” can also be used in association with normalizing a symptom of a disease or condition, i.e. decreasing the difference between a level in a subject suffering from a KHK-associated disease towards or to a level in a normal subject not suffering from a KHK-associated disease. For example, if a subject with a normal weight of 70 kg weighs 90 kg prior to treatment (20 kg overweight) and 80 kg after treatment (10 kg overweight), the subject's weight is lowered towards a normal weight by 50% (10/20×100%). Similarly, if the HDL level of a woman is increased from 50 mg/dL (poor) to 57 mg/dL, with a normal level being 60 mg/dL, the difference between the prior level of the subject and the normal level is decreased by 70% (difference of 10 mg/dL between subject level and normal is decreased by 7 mg/dL, 7/10×100%). As used herein, if a disease is associated with an elevated value for a symptom, “normal” is considered to be the upper limit of normal. If a disease is associated with a decreased value for a symptom, “normal” is considered to be the lower limit of normal.

[0151] As used herein, “prevention” or “preventing,” when used in reference to a disease, disorder or condition thereof, that would benefit from a reduction in expression of a KHK gene or production of KHK protein, refers to a reduction in the likelihood that a subject will develop a symptom associated with such a disease, disorder, or condition, e.g., a sign or symptom of KHK gene expression or KHK activity and increased fructose metabolism. Without being bound by mechanism, it is known that fructose phosphorylation catalyzed by KHK to form fructose-1-phosphate is not regulated by feedback inhibition which can result in depletion of ATP and intracellular phosphate, an increase AMP levels, which results in the production of uric acid. Further, the fructose-1-phosphate is metabolized to glyceraldehyde which feeds into the citric acid cycle increasing the production of acetyl Co-A stimulating fatty acid synthesis. Diseases and conditions associated with elevated uric acid and fatty acid synthesis include, e.g., liver disease (e.g., fatty liver, steatohepatitis including non-alcoholic steatohepatitis (NASH)), dyslipidemia (e.g., hyperlipidemia, high LDL cholesterol, low HDL cholesterol, hypertriglyceridemia, postprandial hypertriglyceridemia), disorders of glycemic control (e.g., insulin resistance not related to immune response to insulin, type 2 diabetes), cardiovascular disease (e.g., hypertension, endothelial cell dysfunction), kidney disease (e.g., acute kidney disorder, tubular dysfunction, proinflammatory changes to the proximal tubules, chronic kidney disease), metabolic syndrome, disease of lipid deposition or dysfunction (e.g., adipocyte dysfunction, visceral adipose deposition, obesity), disease of elevated uric acid (e.g., hyperuricemia, gout), and eating disorders such as excessive sugar craving. The failure to develop a disease, disorder or condition, or the reduction in the development of a symptom or comorbidity associated with such a disease, disorder or condition (e.g., by at least about 10% on a clinically accepted scale for that disease or disorder), or the exhibition of delayed signs or symptoms or disease progression by days, weeks, months or years is considered effective prevention.

[0152] As used herein, the term “ketohexokinase disease” or “KHK-associated disease,” is a disease or disorder that is caused by, or associated with KHK gene expression or KHK protein production. The term “KHK-associated disease” includes a disease, disorder or condition that would benefit from a decrease in KHK gene expression, replication, or protein activity. Non-limiting examples of KHK-associated diseases include, for example, liver disease (e.g., fatty liver, steatohepatitis including non-alcoholic steatohepatitis (NASH)), dyslipidemia (e.g., hyperlipidemia, high LDL cholesterol, low HDL cholesterol, hypertriglyceridemia, postprandial hypertriglyceridemia), disorders of glycemic control (e.g., insulin resistance not related to immune response to insulin, type 2 diabetes), cardiovascular disease (e.g., hypertension, endothelial cell dysfunction), kidney disease (e.g., acute kidney disorder, tubular dysfunction, proinflammatory changes to the proximal tubules, chronic kidney disease), metabolic syndrome, disease of lipid deposition or dysfunction (e.g., adipocyte dysfunction, visceral adipose deposition, obesity), disease of elevated uric acid (e.g., hyperuricemia, gout), and eating disorders such as excessive sugar craving. Further details regarding signs and symptoms of the various diseases or conditions are provided herein and are well known in the art.

[0153] In certain embodiments, a KHK-associated disease is associated with elevated uric acid (e.g. hyperuricemia, gout).

[0154] In certain embodiments, a KHK-associated disease is associated with elevated lipid levels (e.g., fatty liver, steatohepatitis including non-alcoholic steatohepatitis (NASH), dyslipidemia).

[0155] “Therapeutically effective amount,” as used herein, is intended to include the amount of an iRNA that, when administered to a patient for treating a subject having a KHK-associated disease, is sufficient to effect treatment of the disease (e.g., by diminishing, ameliorating, or maintaining the existing disease or one or more symptoms of disease or its related comorbidities). The “therapeutically effective amount” may vary depending on the iRNA, how it is administered, the disease and its severity and the history, age, weight, family history, genetic makeup, stage of pathological processes mediated by KHK gene expression, the types of preceding or concomitant treatments, if any, and other individual characteristics of the patient to be treated.

[0156] “Prophylactically effective amount,” as used herein, is intended to include the amount of an iRNA that, when administered to a subject who does not yet experience or display symptoms of a KHK-associated diseases, but who may be predisposed to a KHK-associated disease, is sufficient to prevent or delay the development or progression of the disease or one or more symptoms of the disease for a clinically significant period of time. The “prophylactically effective amount” may vary depending on the iRNA, how it is administered, the degree of risk of disease, and the history, age, weight, family history, genetic makeup, the types of preceding or concomitant treatments, if any, and other individual characteristics of the patient to be treated.

[0157] A “therapeutically-effective amount” or “prophylacticaly effective amount” also includes an amount of an iRNA that produces some desired local or systemic effect at a reasonable benefit/risk ratio applicable to any treatment. iRNAs employed in the methods of the present invention may be administered in a sufficient amount to produce a reasonable benefit/risk ratio applicable to such treatment.

[0158] The phrase “pharmaceutically acceptable” is employed herein to refer to those compounds, materials, compositions, or dosage forms which are, within the scope of sound medical judgment, suitable for use in contact with the tissues of human subjects and animal subjects without excessive toxicity, irritation, allergic response, or other problem or complication, commensurate with a reasonable benefit/risk ratio.

[0159] The phrase “pharmaceutically-acceptable carrier” as used herein means a pharmaceutically-acceptable material, composition, or vehicle, such as a liquid or solid filler, diluent, excipient, manufacturing aid (e.g., lubricant, talc magnesium, calcium or zinc stearate, or steric acid), or solvent encapsulating material, involved in carrying or transporting the subject compound from one organ, or portion of the body, to another organ, or portion of the body. Each carrier must be “acceptable” in the sense of being compatible with the other ingredients of the formulation and not injurious to the subject being treated. Some examples of materials which can serve as pharmaceutically-acceptable carriers include: (1) sugars, such as lactose, glucose and sucrose; (2) starches, such as corn starch and potato starch; (3) cellulose, and its derivatives, such as sodium carboxymethyl cellulose, ethyl cellulose and cellulose acetate; (4) powdered tragacanth; (5) malt; (6) gelatin; (7) lubricating agents, such as magnesium state, sodium lauryl sulfate and talc; (8) excipients, such as cocoa butter and suppository waxes; (9) oils, such as peanut oil, cottonseed oil, safflower oil, sesame oil, olive oil, corn oil and soybean oil; (10) glycols, such as propylene glycol; (11) polyols, such as glycerin, sorbitol, mannitol and polyethylene glycol; (12) esters, such as ethyl oleate and ethyl laurate; (13) agar; (14) buffering agents, such as magnesium hydroxide and aluminum hydroxide; (15) alginic acid; (16) pyrogen-free water; (17) isotonic saline; (18) Ringer's solution; (19) ethyl alcohol; (20) pH buffered solutions; (21) polyesters, polycarbonates or polyanhydrides; (22) bulking agents, such as polypeptides and amino acids (23) serum component, such as serum albumin, HDL and LDL; and (22) other non-toxic compatible substances employed in pharmaceutical formulations.

[0160] The term “sample,” as used herein, includes a collection of similar fluids, cells, or tissues isolated from a subject, as well as fluids, cells, or tissues present within a subject. Examples of biological fluids include blood, serum and serosal fluids, plasma, cerebrospinal fluid, ocular fluids, lymph, urine, saliva, and the like. Tissue samples may include samples from tissues, organs, or localized regions. For example, samples may be derived from particular organs, parts of organs, or fluids or cells within those organs. In certain embodiments, samples may be derived from the liver (e.g., whole liver or certain segments of liver or certain types of cells in the liver, such as, e.g., hepatocytes). In some embodiments, a “sample derived from a subject” refers to urine obtained from the subject. A “sample derived from a subject” can refer to blood (which can be readily converted to plasma or serum) drawn from the subject.

I. iRNAs of the Invention

[0161] The present invention provides iRNAs which inhibit the expression of a KHK gene. In preferred embodiments, the iRNA includes double stranded ribonucleic acid (dsRNA) molecules for inhibiting the expression of a KHK gene in a cell, such as a cell within a subject, e.g., a mammal, such as a human having or susceptible to a KHK-associated disease. The dsRNAi agent includes an antisense strand having a region of complementarity which is complementary to at least a part of an mRNA formed in the expression of a KHK gene. The region of complementarity is about 30 nucleotides or less in length (e.g., about 30, 29, 28, 27, 26, 25, 24, 23, 22, 21, 20, 19, or 18 nucleotides or less in length). Upon contact with a cell expressing the KHK gene, the iRNA inhibits the expression of the KHK gene (e.g., a human, a primate, a non-primate, or a bird KHK gene) by at least about 20% as assayed by, for example, a PCR or branched DNA (bDNA)-based method, or by a protein-based method, such as by immunofluorescence analysis, using, for example, western blotting or flowcytometric techniques. In preferred embodiments, inhibition of expression is determined by the qPCR method provided in the Example 2, preferably at a 10 nM concentration of the iRNA in the appropriate species matched cell line and delivered to the cell line in the manner provided therein.

[0162] A dsRNA includes two RNA strands that are complementary and hybridize to form a duplex structure under conditions in which the dsRNA will be used. One strand of a dsRNA (the antisense strand) includes a region of complementarity that is substantially complementary, and generally fully complementary, to a target sequence. The target sequence can be derived from the sequence of an mRNA formed during the expression of a KHK gene. The other strand (the sense strand) includes a region that is complementary to the antisense strand, such that the two strands hybridize and form a duplex structure when combined under suitable conditions. As described elsewhere herein and as known in the art, the complementary sequences of a dsRNA can also be contained as self-complementary regions of a single nucleic acid molecule, as opposed to being on separate oligonucleotides.

[0163] Generally, the duplex structure is 15 to 30 base pairs in length, e.g., 15-29, 15-28, 15-27, 15-26, 15-25, 15-24, 15-23, 15-22, 15-21, 15-20, 15-19, 15-18, 15-17, 18-30, 18-29, 18-28, 18-27, 18-26, 18-25, 18-24, 18-23, 18-22, 18-21, 18-20, 19-30, 19-29, 19-28, 19-27, 19-26, 19-25, 19-24, 19-23, 19-22, 19-21, 19-20, 20-30, 20-29, 20-28, 20-27, 20-26, 20-25, 20-24,20-23, 20-22, 20-21, 21-30, 21-29, 21-28, 21-27, 21-26, 21-25, 21-24, 21-23, or 21-22 base pairs in length. Ranges and lengths intermediate to the above recited ranges and lengths are also contemplated to be part of the invention.

[0164] Similarly, the region of complementarity to the target sequence is 15 to 30 nucleotides in length, e.g., 15-29, 15-28, 15-27, 15-26, 15-25, 15-24, 15-23, 15-22, 15-21, 15-20, 15-19, 15-18, 15-17, 18-30, 18-29, 18-28, 18-27, 18-26, 18-25, 18-24, 18-23, 18-22, 18-21, 18-20, 19-30, 19-29, 19-28, 19-27, 19-26, 19-25, 19-24, 19-23, 19-22, 19-21, 19-20, 20-30, 20-29, 20-28, 20-27, 20-26, 20-25, 20-24,20-23, 20-22, 20-21, 21-30, 21-29, 21-28, 21-27, 21-26, 21-25, 21-24, 21-23, or 21-22 nucleotides in length. Ranges and lengths intermediate to the above recited ranges and lengths are also contemplated to be part of the invention.

[0165] In some embodiments, the dsRNA is about 15 to about 23 nucleotides in length, or about 25 to about 30 nucleotides in length. In general, the dsRNA is long enough to serve as a substrate for the Dicer enzyme. For example, it is well-known in the art that dsRNAs longer than about 21-23 nucleotides in length may serve as substrates for Dicer. As the ordinarily skilled person will also recognize, the region of an RNA targeted for cleavage will most often be part of a larger RNA molecule, often an mRNA molecule. Where relevant, a “part” of an mRNA target is a contiguous sequence of an mRNA target of sufficient length to allow it to be a substrate for RNAi-directed cleavage (i.e., cleavage through a RISC pathway).

[0166] One of skill in the art will also recognize that the duplex region is a primary functional portion of a dsRNA, e.g., a duplex region of about 9 to about 36 base pairs, e.g., about 10-36, 11-36, 12-36, 13-36, 14-36, 15-36, 9-35, 10-35, 11-35, 12-35, 13-35, 14-35, 15-35, 9-34, 10-34, 11-34, 12-34, 13-34, 14-34, 15-34, 9-33, 10-33, 11-33, 12-33, 13-33, 14-33, 15-33, 9-32, 10-32, 11-32, 12-32, 13-32, 14-32, 15-32, 9-31, 10-31, 11-31, 12-31, 13-32, 14-31, 15-31, 15-30, 15-29, 15-28, 15-27, 15-26, 15-25, 15-24, 15-23, 15-22, 15-21, 15-20, 15-19, 15-18, 15-17, 18-30, 18-29, 18-28, 18-27, 18-26, 18-25, 18-24, 18-23, 18-22, 18-21, 18-20, 19-30, 19-29, 19-28, 19-27, 19-26, 19-25, 19-24, 19-23, 19-22, 19-21, 19-20, 20-30, 20-29, 20-28, 20-27, 20-26, 20-25, 20-24,20-23, 20-22, 20-21, 21-30, 21-29, 21-28, 21-27, 21-26, 21-25, 21-24, 21-23, or 21-22 base pairs. Thus, in one embodiment, to the extent that it becomes processed to a functional duplex, of e.g., 15-30 base pairs, that targets a desired RNA for cleavage, an RNA molecule or complex of RNA molecules having a duplex region greater than 30 base pairs is a dsRNA. Thus, an ordinarily skilled artisan will recognize that in one embodiment, a miRNA is a dsRNA. In another embodiment, a dsRNA is not a naturally occurring miRNA. In another embodiment, an iRNA agent useful to target KHK gene expression is not generated in the target cell by cleavage of a larger dsRNA.

[0167] A dsRNA as described herein can further include one or more single-stranded nucleotide overhangs e.g., 1-4, 2-4, 1-3, 2-3, 1, 2, 3, or 4 nucleotides. dsRNAs having at least one nucleotide overhang can have superior inhibitory properties relative to their blunt-ended counterparts. A nucleotide overhang can comprise or consist of a nucleotide/nucleoside analog, including a deoxynucleotide/nucleoside. The overhang(s) can be on the sense strand, the antisense strand, or any combination thereof. Furthermore, the nucleotide(s) of an overhang can be present on the 5-end, 3′-end, or both ends of an antisense or sense strand of a dsRNA.

[0168] In certain embodiments, the overhang on the sense strand or the antisense strand, or both, can include extended lengths longer than 10 nucleotides, e.g., 10-30 nucleotides, 10-25 nucleotides, 10-20 nucleotides or 10-15 nucleotides in length. In certain embodiments, an extended overhang is on the sense strand of the duplex. In certain embodiments, an extended overhang is present on the 3′end of the sense strand of the duplex. In certain embodiments, an extended overhang is present on the 5′end of the sense strand of the duplex. In certain embodiments, an extended overhang is on the antisense strand of the duplex. In certain embodiments, an extended overhang is present on the 3′end of the antisense strand of the duplex. In certain embodiments, an extended overhang is present on the 5′end of the antisense strand of the duplex. In certain embodiments, one or more of the nucleotides in the extended overhang is replaced with a nucleoside thiophosphate.

[0169] A dsRNA can be synthesized by standard methods known in the art as further discussed below, e.g., by use of an automated DNA synthesizer, such as are commercially available from, for example, Biosearch, Applied Biosystems, Inc.

[0170] Double stranded RNAi compounds of the invention may be prepared using a two-step procedure. First, the individual strands of the double stranded RNA molecule are prepared separately. Then, the component strands are annealed. The individual strands of the siRNA compound can be prepared using solution-phase or solid-phase organic synthesis or both. Organic synthesis offers the advantage that the oligonucleotide strands comprising unnatural or modified nucleotides can be easily prepared. Similarly, single-stranded oligonucleotides of the invention can be prepared using solution-phase or solid-phase organic synthesis or both.

[0171] In an aspect, a dsRNA of the invention includes at least two nucleotide sequences, a sense sequence and an anti-sense sequence. The sense strand is selected from the group of sequences provided in Tables 3 and 5, and the corresponding antisense strand of the sense strand is selected from the group of sequences of Tables 3 and 5. In this aspect, one of the two sequences is complementary to the other of the two sequences, with one of the sequences being substantially complementary to a sequence of an mRNA generated in the expression of a KHK gene. As such, in this aspect, a dsRNA will include two oligonucleotides, where one oligonucleotide is described as the sense strand in Table 3 or 5, and the second oligonucleotide is described as the corresponding antisense strand of the sense strand in Table 3 or 5. In certain embodiments, the substantially complementary sequences of the dsRNA are contained on separate oligonucleotides. In other embodiments, the substantially complementary sequences of the dsRNA are contained on a single oligonucleotide.

[0172] It will be understood that, although the sequences in Table 3 are not described as modified or conjugated sequences, the RNA of the iRNA of the invention e.g., a dsRNA of the invention, may comprise any one of the sequences set forth in Table 3 that are modified and/or conjugated, or the sequences of Table 5 that are unmodified and/or unconjugated. In other words, the invention encompasses dsRNA of Tables 3 and 5 which are un-modified, un-conjugated, modified, and/or conjugated, as described herein.

[0173] The skilled person is well aware that dsRNAs having a duplex structure of between about 20 and 23 base pairs, e.g., 21, base pairs have been hailed as particularly effective in inducing RNA interference (Elbashir et al., EMBO 2001, 20:6877-6888). However, others have found that shorter or longer RNA duplex structures can also be effective (Chu and Rana (2007) RNA 14:1714-1719; Kim et al. (2005) Nat Biotech 23:222-226). In the embodiments described above, by virtue of the nature of the oligonucleotide sequences provided in any one of Tables 3 and 5, dsRNAs described herein can include at least one strand of a length of minimally 21 nucleotides. It can be reasonably expected that shorter duplexes having one of the sequences of Tables 3 and 5 minus only a few nucleotides on one or both ends can be similarly effective as compared to the dsRNAs described above. Hence, dsRNAs having a sequence of at least 15, 16, 17, 18, 19, 20, or more contiguous nucleotides derived from one of the sequences of Tables 3 and 5, and differing in their ability to inhibit the expression of a KHK gene by not more than about 5, 10, 15, 20, 25, or 30% inhibition from a dsRNA comprising the full sequence, are contemplated to be within the scope of the present invention.

[0174] In addition, the RNAs provided in Tables 3 and 5 identify a site(s) in a KHK transcript that is susceptible to RISC-mediated cleavage. As such, the present invention further features iRNAs that target within one of these sites. As used herein, an iRNA is said to target within a particular site of an RNA transcript if the iRNA promotes cleavage of the transcript anywhere within that particular site. Such an iRNA will generally include at least about 15 contiguous nucleotides from one of the sequences provided in Tables 3 and 5 coupled to additional nucleotide sequences taken from the region contiguous to the selected sequence in a KHK gene.

[0175] While a target sequence is generally about 15-30 nucleotides in length, there is wide variation in the suitability of particular sequences in this range for directing cleavage of any given target RNA. Various software packages and the guidelines set out herein provide guidance for the identification of optimal target sequences for any given gene target, but an empirical approach can also be taken in which a “window” or “mask” of a given size (as a non-limiting example, 21 nucleotides) is literally or figuratively (including, e.g., in silico) placed on the target RNA sequence to identify sequences in the size range that can serve as target sequences. By moving the sequence “window” progressively one nucleotide upstream or downstream of an initial target sequence location, the next potential target sequence can be identified, until the complete set of possible sequences is identified for any given target size selected. This process, coupled with systematic synthesis and testing of the identified sequences (using assays as described herein or as known in the art or provided herein) to identify those sequences that perform optimally can identify those RNA sequences that, when targeted with an iRNA agent, mediate the best inhibition of target gene expression. Thus, while the sequences identified, for example, in Tables 3 and 5 represent effective target sequences, it is contemplated that further optimization of inhibition efficiency can be achieved by progressively “walking the window” one nucleotide upstream or downstream of the given sequences to identify sequences with equal or better inhibition characteristics.

[0176] Further, it is contemplated that for any sequence identified, e.g., in Tables 3 and 5, further optimization could be achieved by systematically either adding or removing nucleotides to generate longer or shorter sequences and testing those sequences generated by walking a window of the longer or shorter size up or down the target RNA from that point. Again, coupling this approach to generating new candidate targets with testing for effectiveness of iRNAs based on those target sequences in an inhibition assay as known in the art or as described herein can lead to further improvements in the efficiency of inhibition. Further still, such optimized sequences can be adjusted by, e.g., the introduction of modified nucleotides as described herein or as known in the art, addition or changes in overhang, or other modifications as known in the art or discussed herein to further optimize the molecule (e.g., increasing serum stability or circulating half-life, increasing thermal stability, enhancing transmembrane delivery, targeting to a particular location or cell type, increasing interaction with silencing pathway enzymes, increasing release from endosomes) as an expression inhibitor.

[0177] An iRNA as described herein can contain one or more mismatches to the target sequence. In one embodiment, an iRNA as described herein contains no more than 3 mismatches. If the antisense strand of the iRNA contains mismatches to a target sequence, it is preferable that the area of mismatch is not located in the center of the region of complementarity. If the antisense strand of the iRNA contains mismatches to the target sequence, it is preferable that the mismatch be restricted to be within the last 5 nucleotides from either the 5′- or 3′-end of the region of complementarity. For example, for a 23 nucleotide iRNA agent the strand which is complementary to a region of a KHK gene, generally does not contain any mismatch within the central 13 nucleotides. The methods described herein or methods known in the art can be used to determine whether an iRNA containing a mismatch to a target sequence is effective in inhibiting the expression of a KHK gene. Consideration of the efficacy of iRNAs with mismatches in inhibiting expression of a KHK gene is important, especially if the particular region of complementarity in a KHK gene is known to have polymorphic sequence variation within the population.

### II. Modified iRNAs of the Invention

[0178] In certain embodiments, the RNA of the iRNA of the invention e.g., a dsRNA, is un-modified, and does not comprise, e.g., chemical modifications or conjugations known in the art and described herein. In other embodiments, the RNA of an iRNA of the invention, e.g., a dsRNA, is chemically modified to enhance stability or other beneficial characteristics. In certain embodiments of the invention, substantially all of the nucleotides of an iRNA of the invention are modified. In other embodiments of the invention, all of the nucleotides of an iRNA or substantially all of the nucleotides of an iRNA are modified, i.e., not more than 5, 4, 3, 2, or 1 unmodified nucleotides are present in a strand of the iRNA.

[0179] The nucleic acids featured in the invention can be synthesized or modified by methods well established in the art, such as those described in “Current protocols in nucleic acid chemistry,” Beaucage, S. L. et al. (Edrs.), John Wiley & Sons, Inc., New York, NY, USA, which is hereby incorporated herein by reference. Modifications include, for example, end modifications, e.g., 5′-end modifications (phosphorylation, conjugation, inverted linkages) or 3′-end modifications (conjugation, DNA nucleotides, inverted linkages, etc.); base modifications, e.g., replacement with stabilizing bases, destabilizing bases, or bases that base pair with an expanded repertoire of partners, removal of bases (abasic nucleotides), or conjugated bases; sugar modifications (e.g., at the 2′-position or 4′-position) or replacement of the sugar; or backbone modifications, including modification or replacement of the phosphodiester linkages. Specific examples of iRNA compounds useful in the embodiments described herein include, but are not limited to RNAs containing modified backbones or no natural internucleoside linkages. RNAs having modified backbones include, among others, those that do not have a phosphorus atom in the backbone. For the purposes of this specification, and as sometimes referenced in the art, modified RNAs that do not have a phosphorus atom in their internucleoside backbone can also be considered to be oligonucleosides. In some embodiments, a modified iRNA will have a phosphorus atom in its internucleoside backbone.

[0180] Modified RNA backbones include, for example, phosphorothioates, chiral phosphorothioates, phosphorodithioates, phosphotriesters, aminoalkylphosphotriesters, methyl and other alkyl phosphonates including 3-alkylene phosphonates and chiral phosphonates, phosphinates, phosphoramidates including 3′-amino phosphoramidate and aminoalkylphosphoramidates, thionophosphoramidates, thionoalkylphosphonates, thionoalkylphosphotriesters, and boranophosphates having normal 3′-5′ linkages, 2′-5′-linked analogs of these, and those having inverted polarity wherein the adjacent pairs of nucleoside units are linked 3′-5′ to 5′-3′ or 2′-5′ to 5′-2′. Various salts, mixed salts and free acid forms are also included.

[0181] Representative US Patents that teach the preparation of the above phosphorus-containing linkages include, but are not limited to, U.S. Pat. Nos. 3,687,808; 4,469,863; 4,476,301; 5,023,243; 5,177,195; 5,188,897; 5,264,423; 5,276,019; 5,278,302; 5,286,717; 5,321,131; 5,399,676; 5,405,939; 5,453,496; 5,455,233; 5,466,677; 5,476,925; 5,519,126; 5,536,821; 5,541,316; 5,550,111; 5,563,253; 5,571,799; 5,587,361; 5,625,050; 6,028,188; 6,124,445; 6,160,109; 6,169,170; 6,172,209; 6,239,265; 6,277,603; 6,326,199; 6,346,614; 6,444,423; 6,531,590; 6,534,639; 6,608,035; 6,683,167; 6,858,715; 6,867,294; 6,878,805; 7,015,315; 7,041,816; 7,273,933; 7,321,029; and U.S. Pat. RE39464, the entire contents of each of which are hereby incorporated herein by reference.

[0182] Modified RNA backbones that do not include a phosphorus atom therein have backbones that are formed by short chain alkyl or cycloalkyl internucleoside linkages, mixed heteroatoms and alkyl or cycloalkyl internucleoside linkages, or one or more short chain heteroatomic or heterocyclic internucleoside linkages. These include those having morpholino linkages (formed in part from the sugar portion of a nucleoside); siloxane backbones; sulfide, sulfoxide and sulfone backbones; formacetyl and thioformacetyl backbones; methylene formacetyl and thioformacetyl backbones; alkene containing backbones; sulfamate backbones; methyleneimino and methylenehydrazino backbones; sulfonate and sulfonamide backbones; amide backbones; and others having mixed N, O, S, and CH₂ component parts.

[0183] Representative US Patents that teach the preparation of the above oligonucleosides include, but are not limited to, U.S. Pat. Nos. 5,034,506; 5,166,315; 5,185,444; 5,214,134; 5,216,141; 5,235,033; 5,64,562; 5,264,564; 5,405,938; 5,434,257; 5,466,677; 5,470,967; 5,489,677; 5,541,307; 5,561,225; 5,596,086; 5,602,240; 5,608,046; 5,610,289; 5,618,704; 5,623,070; 5,663,312; 5,633,360; 5,677,437; and 5,677,439, the entire contents of each of which are hereby incorporated herein by reference.

[0184] Suitable RNA mimetics are contemplated for use in iRNAs provided herein, in which both the sugar and the internucleoside linkage, i.e., the backbone, of the nucleotide units are replaced with novel groups. The base units are maintained for hybridization with an appropriate nucleic acid target compound. One such oligomeric compound in which an RNA mimetic that has been shown to have excellent hybridization properties is referred to as a peptide nucleic acid (PNA). In PNA compounds, the sugar backbone of an RNA is replaced with an amide containing backbone, in particular an aminoethylglycine backbone. The nucleobases are retained and are bound directly or indirectly to aza nitrogen atoms of the amide portion of the backbone. Representative US patents that teach the preparation of PNA compounds include, but are not limited to, U.S. Pat. Nos. 5,539,082; 5,714,331; and 5,719,262, the entire contents of each of which are hereby incorporated herein by reference. Additional PNA compounds suitable for use in the iRNAs of the invention are described in, for example, in Nielsen et al., Science, 1991, 254, 1497-1500.

[0185] Some embodiments featured in the invention include RNAs with phosphorothioate backbones and oligonucleosides with heteroatom backbones, and in particular —CH₂—NH—CH₂—, —CH₂—N(CH₃)—O—CH₂— [known as a methylene (methylimino) or MMI backbone], —CH₂—O—N(CH₃)—CH₂—, —CH₂—N(CH₃)—N(CH₃)—CH₂— and —N(CH₃)—CH₂—CH₂— [wherein the native phosphodiester backbone is represented as —O—P—O—CH₂— ] of the above-referenced U.S. Pat. No. 5,489,677, and the amide backbones of the above-referenced U.S. Pat. No. 5,602,240. In some embodiments, the RNAs featured herein have morpholino backbone structures of the above-referenced U.S. Pat. No. 5,034,506.

[0186] Modified RNAs can also contain one or more substituted sugar moieties. The iRNAs, e.g., dsRNAs, featured herein can include one of the following at the 2′-position: OH; F; O-, S-, or N-alkyl; O-, S-, or N-alkenyl; O-, S- or N-alkynyl; or O-alkyl-O-alkyl, wherein the alkyl, alkenyl and alkynyl can be substituted or unsubstituted C₁ to C₁₀ alkyl or C₂ to C₁₀ alkenyl and alkynyl. Exemplary suitable modifications include O[(CH₂)ₙO]ₘCH₃, O(CH₂)₋ₙOCH₃, O(CH₂)ₙNH₂, O(CH₂)ₙCH₃, O(CH₂)ₙONH₂, and O(CH₂)ₙON[(CH₂)ₙCH₃)]₂, where n and m are from 1 to about 10. In other embodiments, dsRNAs include one of the following at the 2′ position: C₁ to C₁₀ lower alkyl, substituted lower alkyl, alkaryl, aralkyl, O-alkaryl or O-aralkyl, SH, SCH₃, OCN, Cl, Br, CN, CF₃, OCF₃, SOCH₃, SO₂CH₃, ONO₂, NO₂, N₃, NH₂, heterocycloalkyl, heterocycloalkaryl, aminoalkylamino, polyalkylamino, substituted silyl, an RNA cleaving group, a reporter group, an intercalator, a group for improving the pharmacokinetic properties of an iRNA, or a group for improving the pharmacodynamic properties of an iRNA, and other substituents having similar properties. In some embodiments, the modification includes a 2′-methoxyethoxy (2′-O—CH₂CH₂OCH₃, also known as 2′-O-(2-methoxyethyl) or 2′-MOE) (Martin et al., Helv. Chim. Acta, 1995, 78:486-504) i.e., an alkoxy-alkoxy group. Another exemplary modification is 2′-dimethylaminooxyethoxy, i.e., a O(CH₂)₂ON(CH₃)₂ group, also known as 2′-DMAOE, as described in examples herein below, and 2′-dimethylaminoethoxyethoxy (also known in the art as 2′-O-dimethylaminoethoxyethyl or 2′-DMAEOE), i.e., 2′-O—CH₂—O—CH₂—N(CH₂)₂. Further exemplary modifications include: 5′-Me-2′-F nucleotides, 5′-Me-2′-OMe nucleotides, 5′-Me-2′-deoxynucleotides, (both R and S isomers in these three families); 2′-alkoxyalkyl; and 2′-NMA (N-methylacetamide).

[0187] Other modifications include 2′-methoxy (2′-OCH₃), 2′-aminopropoxy (2′-OCH₂CH₂CH₂NH₂) and 2′-fluoro (2′-F). Similar modifications can also be made at other positions on the RNA of an iRNA, particularly the 3′ position of the sugar on the 3′ terminal nucleotide or in 2′-5′ linked dsRNAs and the 5′ position of 5′ terminal nucleotide. iRNAs can also have sugar mimetics such as cyclobutyl moieties in place of the pentofuranosyl sugar. Representative US patents that teach the preparation of such modified sugar structures include, but are not limited to, U.S. Pat. Nos. 4,981,957; 5,118,800; 5,319,080; 5,359,044; 5,393,878; 5,446,137; 5,466,786; 5,514,785; 5,519,134; 5,567,811; 5,576,427; 5,591,722; 5,597,909; 5,610,300; 5,627,053; 5,639,873; 5,646,265; 5,658,873; 5,670,633; and 5,700,920, certain of which are commonly owned with the instant application. The entire contents of each of the foregoing are hereby incorporated herein by reference.

[0188] An iRNA can also include nucleobase (often referred to in the art simply as “base”) modifications or substitutions. As used herein, “unmodified” or “natural” nucleobases include the purine bases adenine (A) and guanine (G), and the pyrimidine bases thymine (T), cytosine (C), and uracil (U). Modified nucleobases include other synthetic and natural nucleobases such as deoxy-thymine (dT), 5-methylcytosine (5-me-C), 5-hydroxymethyl cytosine, xanthine, hypoxanthine, 2-aminoadenine, 6-methyl and other alkyl derivatives of adenine and guanine, 2-propyl and other alkyl derivatives of adenine and guanine, 2-thiouracil, 2-thiothymine and 2-thiocytosine, 5-halouracil and cytosine, 5-propynyl uracil and cytosine, 6-azo uracil, cytosine and thymine, 5-uracil (pseudouracil), 4-thiouracil, 8-halo, 8-amino, 8-thiol, 8-thioalkyl, 8-hydroxyl anal other 8-substituted adenines and guanines, 5-halo, particularly 5-bromo, 5-trifluoromethyl and other 5-substituted uracils and cytosines, 7-methylguanine and 7-methyladenine, 8-azaguanine and 8-azaadenine, 7-deazaguanine and 7-daazaadenine and 3-deazaguanine and 3-deazaadenine. Further nucleobases include those disclosed in U.S. Pat. No. 3,687,808, those disclosed in Modified Nucleosides in Biochemistry, Biotechnology and Medicine, Herdewijn, P. ed. Wiley-VCH, 2008; those disclosed in The Concise Encyclopedia Of Polymer Science And Engineering, pages 858-859, Kroschwitz, J. L, ed. John Wiley & Sons, 1990, these disclosed by Englisch et al., Angewandte Chemie, International Edition, 1991, 30, 613, and those disclosed by Sanghvi, Y S., Chapter 15, dsRNA Research and Applications, pages 289-302, Crooke, S. T. and Lebleu, B., Ed., CRC Press, 1993. Certain of these nucleobases are particularly useful for increasing the binding affinity of the oligomeric compounds featured in the invention. These include 5-substituted pyrimidines, 6-azapyrimidines and N-2, N-6 and 0-6 substituted purines, including 2-aminopropyladenine, 5-propynyluracil and 5-propynylcytosine. 5-methylcytosine substitutions have been shown to increase nucleic acid duplex stability by 0.6-1.2° C. (Sanghvi, Y. S., Crooke, S. T. and Lebleu, B., Eds., dsRNA Research and Applications, CRC Press, Boca Raton, 1993, pp. 276-278) and are exemplary base substitutions, even more particularly when combined with 2′-O-methoxyethyl sugar modifications.

[0189] Representative US Patents that teach the preparation of certain of the above noted modified nucleobases as well as other modified nucleobases include, but are not limited to, the above noted U.S. Pat. Nos. 3,687,808, 4,845,205; 5,130,30; 5,134,066; 5,175,273; 5,367,066; 5,432,272; 5,457,187; 5,459,255; 5,484,908; 5,502,177; 5,525,711; 5,552,540; 5,587,469; 5,594,121, 5,596,091; 5,614,617; 5,681,941; 5,750,692; 6,015,886; 6,147,200; 6,166,197; 6,222,025; 6,235,887; 6,380,368; 6,528,640; 6,639,062; 6,617,438; 7,045,610; 7,427,672; and 7,495,088, the entire contents of each of which are hereby incorporated herein by reference.

[0190] The RNA of an iRNA can also be modified to include one or more locked nucleic acids (LNA). A locked nucleic acid is a nucleotide having a modified ribose moiety in which the ribose moiety comprises an extra bridge connecting the 2′ and 4′ carbons. This structure effectively “locks” the ribose in the 3′-endo structural conformation. The addition of locked nucleic acids to siRNAs has been shown to increase siRNA stability in serum, and to reduce off-target effects (Elmen, J. et al., (2005) Nucleic Acids Research 33(1):439-447; Mook, O R. et al., (2007) Mol Canc Ther 6(3):833-843; Grunweller, A. et al., (2003) Nucleic Acids Research 31(12):3185-3193).

[0191] In some embodiments, the iRNA of the invention comprises one or more monomers that are UNA (unlocked nucleic acid) nucleotides. UNA is unlocked acyclic nucleic acid, wherein any of the bonds of the sugar has been removed, forming an unlocked “sugar” residue. In one example, UNA also encompasses monomer with bonds between C1′-C4′ have been removed (i.e. the covalent carbon-oxygen-carbon bond between the C1′ and C4′ carbons). In another example, the C2′-C3′ bond (i.e. the covalent carbon-carbon bond between the C2′ and C3′ carbons) of the sugar has been removed (see Nuc. Acids Symp. Series, 52, 133-134 (2008) and Fluiter et al., Mol. Biosyst., 2009, 10, 1039 hereby incorporated by reference).

[0192] Representative US publications that teach the preparation of UNA include, but are not limited to, U.S. Pat. No. 8,314,227; and US Patent Publication Nos. 2013/0096289; 2013/0011922; and 2011/0313020, the entire contents of each of which are hereby incorporated herein by reference.

[0193] The RNA of an iRNA can also be modified to include one or more bicyclic sugar moities. A “bicyclic sugar” is a furanosyl ring modified by the bridging of two atoms. A“bicyclic nucleoside” (“BNA”) is a nucleoside having a sugar moiety comprising a bridge connecting two carbon atoms of the sugar ring, thereby forming a bicyclic ring system. In certain embodiments, the bridge connects the 4′-carbon and the 2′-carbon of the sugar ring. Thus, in some embodiments an agent of the invention may include one or more locked nucleic acids (LNA). A locked nucleic acid is a nucleotide having a modified ribose moiety in which the ribose moiety comprises an extra bridge connecting the 2′ and 4′ carbons. In other words, an LNA is a nucleotide comprising a bicyclic sugar moiety comprising a 4′-CH₂—O-2′ bridge. This structure effectively “locks” the ribose in the 3′-endo structural conformation. The addition of locked nucleic acids to siRNAs has been shown to increase siRNA stability in serum, and to reduce off-target effects (Elmen, J. et al., (2005) Nucleic Acids Research 33(1):439-447; Mook, O R. et al., (2007) Mol Canc Ther 6(3):833-843; Grunweller, A. et al., (2003) Nucleic Acids Research 31(12):3185-3193). Examples of bicyclic nucleosides for use in the polynucleotides of the invention include without limitation nucleosides comprising a bridge between the 4′ and the 2′ ribosyl ring atoms. In certain embodiments, the antisense polynucleotide agents of the invention include one or more bicyclic nucleosides comprising a 4′ to 2′ bridge. Examples of such 4′ to 2′ bridged bicyclic nucleosides, include but are not limited to 4′-(CH₂)—O-2′ (LNA); 4′-(CH₂)—S-2′; 4′-(CH₂)₂-O-2′ (ENA); 4′-CH(CH₃)—O-2′ (also referred to as “constrained ethyl” or “cEt”) and 4′-CH(CH₂OCH₃)—O-2′ (and analogs thereof; see, e.g., U.S. Pat. No. 7,399,845); 4′-C(CH₃)(CH₃)—O-2′ (and analogs thereof; see e.g., U.S. Pat. No. 8,278,283); 4′-CH₂—N(OCH₃)-2′ (and analogs thereof; see e.g., U.S. Pat. No. 8,278,425); 4′-CH₂—O—N(CH₃)-2′ (see, e.g., US Patent Publication No. 2004/0171570); 4′-CH₂—N(R)—O-2′, wherein R is H, C1-C12 alkyl, or a protecting group (see, e.g., U.S. Pat. No. 7,427,672); 4′-CH₂—C(H)(CH₃)-2′ (see, e.g., Chattopadhyaya et al., J. Org. Chem., 2009, 74, 118-134); and 4′-CH₂—C(═CH₂)-2′ (and analogs thereof; see, e.g., U.S. Pat. No. 8,278,426). The entire contents of each of the foregoing are hereby incorporated herein by reference.

[0194] Additional representative US Patents and US Patent Publications that teach the preparation of locked nucleic acid nucleotides include, but are not limited to, the following: U.S. Pat. Nos. 6,268,490; 6,525,191; 6,670,461; 6,770,748; 6,794,499; 6,998,484; 7,053,207; 7,034,133; 7,084,125; 7,399,845; 7,427,672; 7,569,686; 7,741,457; 8,022,193; 8,030,467; 8,278,425; 8,278,426; 8,278,283; US 2008/0039618; and US 2009/0012281, the entire contents of each of which are hereby incorporated herein by reference.

[0195] Any of the foregoing bicyclic nucleosides can be prepared having one or more stereochemical sugar configurations including for example α-L-ribofuranose and β-D-ribofuranose (see WO 99/14226).

[0196] The RNA of an iRNA can also be modified to include one or more constrained ethyl nucleotides. As used herein, a “constrained ethyl nucleotide” or “cEt” is a locked nucleic acid comprising a bicyclic sugar moiety comprising a 4′-CH(CH₃)—O-2′ bridge. In one embodiment, a constrained ethyl nucleotide is in the S conformation referred to herein as “S-cEt.”

[0197] An iRNA of the invention may also include one or more “conformationally restricted nucleotides” (“CRN”). CRN are nucleotide analogs with a linker connecting the C2′ and C4′ carbons of ribose or the C3 and —C5′ carbons of ribose. CRN lock the ribose ring into a stable conformation and increase the hybridization affinity to mRNA. The linker is of sufficient length to place the oxygen in an optimal position for stability and affinity resulting in less ribose ring puckering.

[0198] Representative publications that teach the preparation of certain of the above noted CRN include, but are not limited to, US Patent Publication No. 2013/0190383; and PCT publication WO 2013/036868, the entire contents of each of which are hereby incorporated herein by reference.

[0199] Potentially stabilizing modifications to the ends of RNA molecules can include N-(acetylaminocaproyl)-4-hydroxyprolinol (Hyp-C6-NHAc), N-(caproyl-4-hydroxyprolinol (Hyp-C6), N-(acetyl-4-hydroxyprolinol (Hyp-NHAc), thymidine-2′-O-deoxythymidine (ether), N-(aminocaproyl)-4-hydroxyprolinol (Hyp-C6-amino), 2-docosanoyl-uridine-3″-phosphate, inverted base dT(idT) and others. Disclosure of this modification can be found in PCT Publication No. WO 2011/005861.

[0200] Other modifications of the nucleotides of an iRNA of the invention include a 5′ phosphate or 5′ phosphate mimic, e.g., a 5′-terminal phosphate or phosphate mimic on the antisense strand of an iRNA. Suitable phosphate mimics are disclosed in, for example US Patent Publication No. 2012/0157511, the entire contents of which are incorporated herein by reference.

[0201] A. Modified iRNAs Comprising Motifs of the Invention

[0202] In certain aspects of the invention, the double stranded RNAi agents of the invention include agents with chemical modifications as disclosed, for example, in WO2013/075035, the entire contents of each of which are incorporated herein by reference. WO2013/075035 provides motifs of three identical modifications on three consecutive nucleotides into a sense strand or antisense strand of a dsRNAi agent, particularly at or near the cleavage site. In some embodiments, the sense strand and antisense strand of the dsRNAi agent may otherwise be completely modified. The introduction of these motifs interrupts the modification pattern, if present, of the sense or antisense strand. The dsRNAi agent may be optionally conjugated with a GalNAc derivative ligand, for instance on the sense strand.

[0203] More specifically, when the sense strand and antisense strand of the double stranded RNAi agent are completely modified to have one or more motifs of three identical modifications on three consecutive nucleotides at or near the cleavage site of at least one strand of a dsRNAi agent, the gene silencing activity of the dsRNAi agent was observed.

[0204] Accordingly, the invention provides double stranded RNAi agents capable of inhibiting the expression of a target gene (i.e., KHK gene) in vivo. The RNAi agent comprises a sense strand and an antisense strand. Each strand of the RNAi agent may be, independently, 12-30 nucleotides in length. For example, each strand may independently be 14-30 nucleotides in length, 17-30 nucleotides in length, 25-30 nucleotides in length, 27-30 nucleotides in length, 17-23 nucleotides in length, 17-21 nucleotides in length, 17-19 nucleotides in length, 19-25 nucleotides in length, 19-23 nucleotides in length, 19-21 nucleotides in length, 21-25 nucleotides in length, or 21-23 nucleotides in length.

[0205] The sense strand and antisense strand typically form a duplex double stranded RNA (“dsRNA”), also referred to herein as “dsRNAi agent.” The duplex region of an dsRNAi agent may be 12-30 nucleotide pairs in length. For example, the duplex region can be 14-30 nucleotide pairs in length, 17-30 nucleotide pairs in length, 27-30 nucleotide pairs in length, 17-23 nucleotide pairs in length, 17-21 nucleotide pairs in length, 17-19 nucleotide pairs in length, 19-25 nucleotide pairs in length, 19-23 nucleotide pairs in length, 19-21 nucleotide pairs in length, 21-25 nucleotide pairs in length, or 21-23 nucleotide pairs in length. In another example, the duplex region is selected from 15, 16, 17, 18, 19, 20, 21, 22, 23, 24, 25, 26, and 27 nucleotides in length.

[0206] In certain embodiments, the dsRNAi agent may contain one or more overhang regions or capping groups at the 3′-end, 5′-end, or both ends of one or both strands. The overhang can be, independently, 1-6 nucleotides in length, for instance 2-6 nucleotides in length, 1-5 nucleotides in length, 2-5 nucleotides in length, 1-4 nucleotides in length, 2-4 nucleotides in length, 1-3 nucleotides in length, 2-3 nucleotides in length, or 1-2 nucleotides in length. In certain embodiments, the overhang regions can include extended overhang regions as provided above. The overhangs can be the result of one strand being longer than the other, or the result of two strands of the same length being staggered. The overhang can form a mismatch with the target mRNA or it can be complementary to the gene sequences being targeted or can be another sequence. The first and second strands can also be joined, e.g., by additional bases to form a hairpin, or by other non-base linkers.

[0207] In certain embodiments, the nucleotides in the overhang region of the dsRNAi agent can each independently be a modified or unmodified nucleotide including, but no limited to 2′-sugar modified, such as, 2′-F, 2′-O-methyl, thymidine (T), 2′-O-methoxyethyl-5-methyluridine (Teo), 2′-O-methoxyethyladenosine (Aeo), 2′-O-methoxyethyl-5-methylcytidine (m5Ceo), and any combinations thereof. For example, TT can be an overhang sequence for either end on either strand. The overhang can form a mismatch with the target mRNA or it can be complementary to the gene sequences being targeted or can be another sequence.

[0208] The 5′- or 3′-overhangs at the sense strand, antisense strand, or both strands of the dsRNAi agent may be phosphorylated. In some embodiments, the overhang region(s) contains two nucleotides having a phosphorothioate between the two nucleotides, where the two nucleotides can be the same or different. In some embodiments, the overhang is present at the 3′-end of the sense strand, antisense strand, or both strands. In some embodiments, this 3′-overhang is present in the antisense strand. In some embodiments, this 3′-overhang is present in the sense strand.

[0209] The dsRNAi agent may contain only a single overhang, which can strengthen the interference activity of the RNAi, without affecting its overall stability. For example, the single-stranded overhang may be located at the 3′-end of the sense strand or, alternatively, at the 3-end of the antisense strand. The RNAi may also have a blunt end, located at the 5′-end of the antisense strand (or the 3′-end of the sense strand) or vice versa. Generally, the antisense strand of the dsRNAi agent has a nucleotide overhang at the 3′-end, and the 5′-end is blunt. While not wishing to be bound by theory, the asymmetric blunt end at the 5′-end of the antisense strand and 3′-end overhang of the antisense strand favor the guide strand loading into RISC process.

[0210] In certain embodiments, the dsRNAi agent is a double ended bluntmer of 19 nucleotides in length, wherein the sense strand contains at least one motif of three 2′-F modifications on three consecutive nucleotides at positions 7, 8, 9 from the 5′end. The antisense strand contains at least one motif of three 2′-O-methyl modifications on three consecutive nucleotides at positions 11, 12, 13 from the 5′end.

[0211] In other embodiments, the dsRNAi agent is a double ended bluntmer of 20 nucleotides in length, wherein the sense strand contains at least one motif of three 2′-F modifications on three consecutive nucleotides at positions 8, 9, 10 from the 5′end. The antisense strand contains at least one motif of three 2′-O-methyl modifications on three consecutive nucleotides at positions 11, 12, 13 from the 5′end.

[0212] In yet other embodiments, the dsRNAi agent is a double ended bluntmer of 21 nucleotides in length, wherein the sense strand contains at least one motif of three 2′-F modifications on three consecutive nucleotides at positions 9, 10, 11 from the 5′end. The antisense strand contains at least one motif of three 2′-O-methyl modifications on three consecutive nucleotides at positions 11, 12, 13 from the 5′end.

[0213] In certain embodiments, the dsRNAi agent comprises a 21 nucleotide sense strand and a 23 nucleotide antisense strand, wherein the sense strand contains at least one motif of three 2′-F modifications on three consecutive nucleotides at positions 9, 10, 11 from the 5′end; the antisense strand contains at least one motif of three 2′-O-methyl modifications on three consecutive nucleotides at positions 11, 12, 13 from the 5′end, wherein one end of the RNAi agent is blunt, while the other end comprises a 2 nucleotide overhang. Preferably, the 2 nucleotide overhang is at the 3′-end of the antisense strand.

[0214] When the 2 nucleotide overhang is at the 3′-end of the antisense strand, there may be two phosphorothioate internucleotide linkages between the terminal three nucleotides, wherein two of the three nucleotides are the overhang nucleotides, and the third nucleotide is a paired nucleotide next to the overhang nucleotide. In one embodiment, the RNAi agent additionally has two phosphorothioate internucleotide linkages between the terminal three nucleotides at both the 5′-end of the sense strand and at the 5′-end of the antisense strand. In certain embodiments, every nucleotide in the sense strand and the antisense strand of the dsRNAi agent, including the nucleotides that are part of the motifs are modified nucleotides. In certain embodiments each residue is independently modified with a 2′-O-methyl or 3′-fluoro, e.g., in an alternating motif. Optionally, the dsRNAi agent further comprises a ligand (preferably GalNAc₃).

[0215] In certain embodiments, the dsRNAi agent comprises a sense and an antisense strand, wherein the sense strand is 25-30 nucleotide residues in length, wherein starting from the 5′ terminal nucleotide (position 1) positions 1 to 23 of the first strand comprise at least 8 ribonucleotides; the antisense strand is 36-66 nucleotide residues in length and, starting from the 3′ terminal nucleotide, comprises at least 8 ribonucleotides in the positions paired with positions 1-23 of sense strand to form a duplex; wherein at least the 3′ terminal nucleotide of antisense strand is unpaired with sense strand, and up to 6 consecutive 3′ terminal nucleotides are unpaired with sense strand, thereby forming a 3′ single stranded overhang of 1-6 nucleotides; wherein the 5′ terminus of antisense strand comprises from 10-30 consecutive nucleotides which are unpaired with sense strand, thereby forming a 10-30 nucleotide single stranded 5′ overhang; wherein at least the sense strand 5′ terminal and 3′ terminal nucleotides are base paired with nucleotides of antisense strand when sense and antisense strands are aligned for maximum complementarity, thereby forming a substantially duplexed region between sense and antisense strands; and antisense strand is sufficiently complementary to a target RNA along at least 19 ribonucleotides of antisense strand length to reduce target gene expression when the double stranded nucleic acid is introduced into a mammalian cell; and wherein the sense strand contains at least one motif of three 2′-F modifications on three consecutive nucleotides, where at least one of the motifs occurs at or near the cleavage site. The antisense strand contains at least one motif of three 2′-O-methyl modifications on three consecutive nucleotides at or near the cleavage site.

[0216] In certain embodiments, the dsRNAi agent comprises sense and antisense strands, wherein the dsRNAi agent comprises a first strand having a length which is at least 25 and at most 29 nucleotides and a second strand having a length which is at most 30 nucleotides with at least one motif of three 2′-O-methyl modifications on three consecutive nucleotides at position 11, 12, 13 from the 5′ end; wherein the 3′ end of the first strand and the 5′ end of the second strand form a blunt end and the second strand is 1-4 nucleotides longer at its 3′ end than the first strand, wherein the duplex region region which is at least 25 nucleotides in length, and the second strand is sufficiently complementary to a target mRNA along at least 19 nucleotide of the second strand length to reduce target gene expression when the RNAi agent is introduced into a mammalian cell, and wherein Dicer cleavage of the dsRNAi agent preferentially results in an siRNA comprising the 3′-end of the second strand, thereby reducing expression of the target gene in the mammal. Optionally, the dsRNAi agent further comprises a ligand.

[0217] In certain embodiments, the sense strand of the dsRNAi agent contains at least one motif of three identical modifications on three consecutive nucleotides, where one of the motifs occurs at the cleavage site in the sense strand.

[0218] In certain embodiments, the antisense strand of the dsRNAi agent can also contain at least one motif of three identical modifications on three consecutive nucleotides, where one of the motifs occurs at or near the cleavage site in the antisense strand.

[0219] For a dsRNAi agent having a duplex region of 17-23 nucleotide in length, the cleavage site of the antisense strand is typically around the 10, 11, and 12 positions from the 5′-end. Thus the motifs of three identical modifications may occur at the 9, 10, 11 positions; the 10, 11, 12 positions; the 11, 12, 13 positions; the 12, 13, 14 positions; or the 13, 14, 15 positions of the antisense strand, the count starting from the first nucleotide from the 5′-end of the antisense strand, or, the count starting from the first paired nucleotide within the duplex region from the 5′-end of the antisense strand. The cleavage site in the antisense strand may also change according to the length of the duplex region of the dsRNAi agent from the 5′-end.

[0220] The sense strand of the dsRNAi agent may contain at least one motif of three identical modifications on three consecutive nucleotides at the cleavage site of the strand; and the antisense strand may have at least one motif of three identical modifications on three consecutive nucleotides at or near the cleavage site of the strand. When the sense strand and the antisense strand form a dsRNA duplex, the sense strand and the antisense strand can be so aligned that one motif of the three nucleotides on the sense strand and one motif of the three nucleotides on the antisense strand have at least one nucleotide overlap, i.e., at least one of the three nucleotides of the motif in the sense strand forms a base pair with at least one of the three nucleotides of the motif in the antisense strand. Alternatively, at least two nucleotides may overlap, or all three nucleotides may overlap.

[0221] In some embodiments, the sense strand of the dsRNAi agent may contain more than one motif of three identical modifications on three consecutive nucleotides. The first motif may occur at or near the cleavage site of the strand and the other motifs may be a wing modification. The term “wing modification” herein refers to a motif occurring at another portion of the strand that is separated from the motif at or near the cleavage site of the same strand. The wing modification is either adjacent to the first motif or is separated by at least one or more nucleotides. When the motifs are immediately adjacent to each other then the chemistries of the motifs are distinct from each other, and when the motifs are separated by one or more nucleotide than the chemistries can be the same or different. Two or more wing modifications may be present. For instance, when two wing modifications are present, each wing modification may occur at one end relative to the first motif which is at or near cleavage site or on either side of the lead motif.

[0222] Like the sense strand, the antisense strand of the dsRNAi agent may contain more than one motifs of three identical modifications on three consecutive nucleotides, with at least one of the motifs occurring at or near the cleavage site of the strand. This antisense strand may also contain one or more wing modifications in an alignment similar to the wing modifications that may be present on the sense strand.

[0223] In some embodiments, the wing modification on the sense strand or antisense strand of the dsRNAi agent typically does not include the first one or two terminal nucleotides at the 3′-end, 5′-end, or both ends of the strand.

[0224] In other embodiments, the wing modification on the sense strand or antisense strand of the dsRNAi agent typically does not include the first one or two paired nucleotides within the duplex region at the 3′-end, 5′-end, or both ends of the strand.

[0225] When the sense strand and the antisense strand of the dsRNAi agent each contain at least one wing modification, the wing modifications may fall on the same end of the duplex region, and have an overlap of one, two, or three nucleotides.

[0226] When the sense strand and the antisense strand of the dsRNAi agent each contain at least two wing modifications, the sense strand and the antisense strand can be so aligned that two modifications each from one strand fall on one end of the duplex region, having an overlap of one, two, or three nucleotides; two modifications each from one strand fall on the other end of the duplex region, having an overlap of one, two or three nucleotides; two modifications one strand fall on each side of the lead motif, having an overlap of one, two or three nucleotides in the duplex region.

[0227] In some embodiments, every nucleotide in the sense strand and antisense strand of the dsRNAi agent, including the nucleotides that are part of the motifs, may be modified. Each nucleotide may be modified with the same or different modification which can include one or more alteration of one or both of the non-linking phosphate oxygens or of one or more of the linking phosphate oxygens; alteration of a constituent of the ribose sugar, e.g., of the 2′-hydroxyl on the ribose sugar; wholesale replacement of the phosphate moiety with “dephospho” linkers; modification or replacement of a naturally occurring base; and replacement or modification of the ribose-phosphate backbone.

[0228] As nucleic acids are polymers of subunits, many of the modifications occur at a position which is repeated within a nucleic acid, e.g., a modification of a base, or a phosphate moiety, or a non-linking O of a phosphate moiety. In some cases the modification will occur at all of the subject positions in the nucleic acid but in many cases it will not. By way of example, a modification may only occur at a 3′- or 5′-terminal position, may only occur in a terminal region, e.g., at a position on a terminal nucleotide or in the last 2, 3, 4, 5, or 10 nucleotides of a strand. A modification may occur in a double strand region, a single strand region, or in both. A modification may occur only in the double strand region of a dsRNAi agent or may only occur in a single strand region of a dsRNAi agent. For example, a phosphorothioate modification at a non-linking O position may only occur at one or both ends, may only occur in a terminal region, e.g., at a position on a terminal nucleotide, or in the last 2, 3, 4, 5, or 10 nucleotides of a strand, or may occur in double strand and single strand regions, particularly at the ends. The 5′-end or ends can be phosphorylated.

[0229] It may be possible, e.g., to enhance stability, to include particular bases in overhangs, or to include modified nucleotides or nucleotide surrogates, in single strand overhangs, e.g., in a 5′- or 3′-overhang, or in both. For example, it can be desirable to include purine nucleotides in overhangs. In some embodiments all or some of the bases in a 3′- or 5′-overhang may be modified, e.g., with a modification described herein. Modifications can include, e.g., the use of modifications at the 2′ position of the ribose sugar with modifications that are known in the art, e.g., the use of deoxyribonucleotides, 2′-deoxy-2′-fluoro (2′-F) or 2′-O-methyl modified instead of the ribosugar of the nucleobase, and modifications in the phosphate group, e.g., phosphorothioate modifications. Overhangs need not be homologous with the target sequence.

[0230] In some embodiments, each residue of the sense strand and antisense strand is independently modified with LNA, CRN, cET, UNA, HNA, CeNA, 2′-methoxyethyl, 2′-O-methyl, 2′-O-allyl, 2′-C-allyl, 2′-deoxy, 2′-hydroxyl, or 2′-fluoro. The strands can contain more than one modification. In one embodiment, each residue of the sense strand and antisense strand is independently modified with 2′-O-methyl or 2′-fluoro.

[0231] At least two different modifications are typically present on the sense strand and antisense strand. Those two modifications may be the 2′-O-methyl or 2′-fluoro modifications, or others.

[0232] In certain embodiments, the Nₐ or N_{b} comprise modifications of an alternating pattern. The term “alternating motif” as used herein refers to a motif having one or more modifications, each modification occurring on alternating nucleotides of one strand. The alternating nucleotide may refer to one per every other nucleotide or one per every three nucleotides, or a similar pattern. For example, if A, B and C each represent one type of modification to the nucleotide, the alternating motif can be “ABABABABABAB . . . ,” “AABBAABBAABB . . . ,” “AABAABAABAAB . . . ,” “AAABAAABAAAB . . . ,” “AAABBBAAABBB . . . ,” or “ABCABCABCABC . . . ,” etc.

[0233] The type of modifications contained in the alternating motif may be the same or different. For example, if A, B, C, D each represent one type of modification on the nucleotide, the alternating pattern, i.e., modifications on every other nucleotide, may be the same, but each of the sense strand or antisense strand can be selected from several possibilities of modifications within the alternating motif such as “ABABAB . . . ”, “ACACAC . . . ” “BDBDBD . . . ” or “CDCDCD . . . ,” etc.

[0234] In some embodiments, the dsRNAi agent of the invention comprises the modification pattern for the alternating motif on the sense strand relative to the modification pattern for the alternating motif on the antisense strand is shifted. The shift may be such that the modified group of nucleotides of the sense strand corresponds to a differently modified group of nucleotides of the antisense strand and vice versa. For example, the sense strand when paired with the antisense strand in the dsRNA duplex, the alternating motif in the sense strand may start with “ABABAB” from 5′ to 3′ of the strand and the alternating motif in the antisense strand may start with “BABABA” from 5′ to 3′ of the strand within the duplex region. As another example, the alternating motif in the sense strand may start with “AABBAABB” from 5′ to 3′ of the strand and the alternating motif in the antisense strand may start with “BBAABBAA” from 5′ to 3′ of the strand within the duplex region, so that there is a complete or partial shift of the modification patterns between the sense strand and the antisense strand.

[0235] In some embodiments, the dsRNAi agent comprises the pattern of the alternating motif of 2′-O-methyl modification and 2′-F modification on the sense strand initially has a shift relative to the pattern of the alternating motif of 2′-O-methyl modification and 2′-F modification on the antisense strand initially, i.e., the 2′-O-methyl modified nucleotide on the sense strand base pairs with a 2′-F modified nucleotide on the antisense strand and vice versa. The 1 position of the sense strand may start with the 2′-F modification, and the 1 position of the antisense strand may start with the 2′-O-methyl modification.

[0236] The introduction of one or more motifs of three identical modifications on three consecutive nucleotides to the sense strand or antisense strand interrupts the initial modification pattern present in the sense strand or antisense strand. This interruption of the modification pattern of the sense or antisense strand by introducing one or more motifs of three identical modifications on three consecutive nucleotides to the sense or antisense strand may enhance the gene silencing activity against the target gene.

[0237] In some embodiments, when the motif of three identical modifications on three consecutive nucleotides is introduced to any of the strands, the modification of the nucleotide next to the motif is a different modification than the modification of the motif. For example, the portion of the sequence containing the motif is “ . . . NₐYYYN_{b} . . . ,” where “Y” represents the modification of the motif of three identical modifications on three consecutive nucleotide, and “Nₐ” and “N_{b}” represent a modification to the nucleotide next to the motif “YYY” that is different than the modification of Y, and where Nₐ and N_{b} can be the same or different modifications. Alternatively, Nₐ or N_{b} may be present or absent when there is a wing modification present.

[0238] The iRNA may further comprise at least one phosphorothioate or methylphosphonate internucleotide linkage. The phosphorothioate or methylphosphonate internucleotide linkage modification may occur on any nucleotide of the sense strand, antisense strand, or both strands in any position of the strand. For instance, the internucleotide linkage modification may occur on every nucleotide on the sense strand or antisense strand; each internucleotide linkage modification may occur in an alternating pattern on the sense strand or antisense strand; or the sense strand or antisense strand may contain both internucleotide linkage modifications in an alternating pattern. The alternating pattern of the internucleotide linkage modification on the sense strand may be the same or different from the antisense strand, and the alternating pattern of the internucleotide linkage modification on the sense strand may have a shift relative to the alternating pattern of the internucleotide linkage modification on the antisense strand. In one embodiment, a double-stranded RNAi agent comprises 6-8phosphorothioate internucleotide linkages. In some embodiments, the antisense strand comprises two phosphorothioate internucleotide linkages at the 5′-end and two phosphorothioate internucleotide linkages at the 3′-end, and the sense strand comprises at least two phosphorothioate internucleotide linkages at either the 5′-end or the 3′-end.

[0239] In some embodiments, the dsRNAi agent comprises a phosphorothioate or methylphosphonate internucleotide linkage modification in the overhang region. For example, the overhang region may contain two nucleotides having a phosphorothioate or methylphosphonate internucleotide linkage between the two nucleotides. Internucleotide linkage modifications also may be made to link the overhang nucleotides with the terminal paired nucleotides within the duplex region. For example, at least 2, 3, 4, or all the overhang nucleotides may be linked through phosphorothioate or methylphosphonate internucleotide linkage, and optionally, there may be additional phosphorothioate or methylphosphonate internucleotide linkages linking the overhang nucleotide with a paired nucleotide that is next to the overhang nucleotide. For instance, there may be at least two phosphorothioate internucleotide linkages between the terminal three nucleotides, in which two of the three nucleotides are overhang nucleotides, and the third is a paired nucleotide next to the overhang nucleotide. These terminal three nucleotides may be at the 3′-end of the antisense strand, the 3′-end of the sense strand, the 5′-end of the antisense strand, or the 5′end of the antisense strand.

[0240] In some embodiments, the 2-nucleotide overhang is at the 3′-end of the antisense strand, and there are two phosphorothioate internucleotide linkages between the terminal three nucleotides, wherein two of the three nucleotides are the overhang nucleotides, and the third nucleotide is a paired nucleotide next to the overhang nucleotide. Optionally, the dsRNAi agent may additionally have two phosphorothioate internucleotide linkages between the terminal three nucleotides at both the 5′-end of the sense strand and at the 5′-end of the antisense strand.

[0241] In one embodiment, the dsRNAi agent comprises mismatch(es) with the target, within the duplex, or combinations thereof. The mistmatch may occur in the overhang region or the duplex region. The base pair may be ranked on the basis of their propensity to promote dissociation or melting (e.g., on the free energy of association or dissociation of a particular pairing, the simplest approach is to examine the pairs on an individual pair basis, though next neighbor or similar analysis can also be used). In terms of promoting dissociation: A:U is preferred over G:C; G:U is preferred over G:C; and I:C is preferred over G:C (I=inosine). Mismatches, e.g., non-canonical or other than canonical pairings (as described elsewhere herein) are preferred over canonical (A:T, A:U, G:C) pairings; and pairings which include a universal base are preferred over canonical pairings.

[0242] In certain embodiments, the dsRNAi agent comprises at least one of the first 1, 2, 3, 4, or 5 base pairs within the duplex regions from the 5′-end of the antisense strand independently selected from the group of: A:U, G:U, I:C, and mismatched pairs, e.g., non-canonical or other than canonical pairings or pairings which include a universal base, to promote the dissociation of the antisense strand at the 5′-end of the duplex.

[0243] In certain embodiments, the nucleotide at the 1 position within the duplex region from the 5′-end in the antisense strand is selected from A, dA, dU, U, and dT. Alternatively, at least one of the first 1, 2, or 3 base pair within the duplex region from the 5′-end of the antisense strand is an AU base pair. For example, the first base pair within the duplex region from the 5′-end of the antisense strand is an AU base pair.

[0244] In other embodiments, the nucleotide at the 3′-end of the sense strand is deoxy-thymine (dT) or the nucleotide at the 3′-end of the antisense strand is deoxy-thymine (dT). For example, there is a short sequence of deoxy-thymine nucleotides, for example, two dT nucleotides on the 3′-end of the sense, antisense strand, or both strands.

[0245] In certain embodiments, the sense strand sequence may be represented by formula (I):

5′ nₚ-Nₐ-(XXX)i-N_{b}-YYY-N_{b}-(ZZZ)ⱼ-Nₐ-n_{q} 3′ (I)
[0246] wherein:
[0247] i and j are each independently 0 or 1;
[0248] p and q are each independently 0-6;
[0249] each Nₐ independently represents an oligonucleotide sequence comprising 0-25 modified nucleotides, each sequence comprising at least two differently modified nucleotides;
[0250] each N_{b} independently represents an oligonucleotide sequence comprising 0-10 modified nucleotides;
[0251] each nₚ and n_{q} independently represent an overhang nucleotide;
[0252] wherein N_{b} and Y do not have the same modification; and
[0253] XXX, YYY, and ZZZ each independently represent one motif of three identical modifications on three consecutive nucleotides. Preferably YYY is all 2′-F modified nucleotides.

[0254] In some embodiments, the Nₐ or N_{b} comprises modifications of alternating pattern.

[0255] In some embodiments, the YYY motif occurs at or near the cleavage site of the sense strand. For example, when the dsRNAi agent has a duplex region of 17-23 nucleotides in length, the YYY motif can occur at or the vicinity of the cleavage site (e.g.: can occur at positions 6, 7, 8; 7, 8, 9; 8, 9, 10; 9, 10, 11; 10, 11, 12; or 11, 12, 13) of the sense strand, the count starting from the first nucleotide, from the 5′-end; or optionally, the count starting at the first paired nucleotide within the duplex region, from the 5′-end.

[0256] In one embodiment, i is 1 and j is 0, or i is 0 and j is 1, or both i and j are 1. The sense strand can therefore be represented by the following formulas:

5′ nₚ-Nₐ-YYY—N_{b}-ZZZ—Nₐ-n_{q} 3′ (Ib);

5′ nₚ-Nₐ-XXX—N_{b}-YYY—Nₐ-n_{q} 3′ (Ic); or

5′ nₚ-Nₐ-XXX—N_{b}-YYY—N_{b}-ZZZ—Nₐ-n_{q} 3′ (Id).

[0257] When the sense strand is represented by formula (Ib), N_{b} represents an oligonucleotide sequence comprising 0-10, 0-7, 0-5, 0-4, 0-2, or 0 modified nucleotides. Each Nₐ independently can represent an oligonucleotide sequence comprising 2-20, 2-15, or 2-10 modified nucleotides.

[0258] When the sense strand is represented as formula (Ic), N_{b} represents an oligonucleotide sequence comprising 0-10, 0-7, 0-10, 0-7, 0-5, 0-4, 0-2, or 0 modified nucleotides. Each Nₐ can independently represent an oligonucleotide sequence comprising 2-20, 2-15, or 2-10 modified nucleotides.

[0259] When the sense strand is represented as formula (Id), each N_{b} independently represents an oligonucleotide sequence comprising 0-10, 0-7, 0-5, 0-4, 0-2, or 0 modified nucleotides. Preferably, N_{b} is 0, 1, 2, 3, 4, 5, or 6 Each Nₐ can independently represent an oligonucleotide sequence comprising 2-20, 2-15, or 2-10 modified nucleotides.

[0260] Each of X, Y and Z may be the same or different from each other.

[0261] In other embodiments, i is 0 and j is 0, and the sense strand may be represented by the formula:

5′ nₚ-Nₐ-YYY-Nₐ-n_{q} 3′ (Ia).

[0262] When the sense strand is represented by formula (Ia), each Nₐ independently can represent an oligonucleotide sequence comprising 2-20, 2-15, or 2-10 modified nucleotides.

[0263] In one embodiment, the antisense strand sequence of the RNAi may be represented by formula (II):

5′ n_{q}′-Nₐ′-(Z′Z′Z′)ₖ-N_{b}′-Y′Y′Y′-N_{b}′-(X′X′X′)ₗ-N′ₐ-nₚ′ 3′ (II)
[0264] wherein:
[0265] k and l are each independently 0 or 1;
[0266] p′ and q′ are each independently 0-6;
[0267] each Nₐ′ independently represents an oligonucleotide sequence comprising 0-25 modified nucleotides, each sequence comprising at least two differently modified nucleotides;
[0268] each N_{b}′ independently represents an oligonucleotide sequence comprising 0-10 modified nucleotides;
[0269] each nₚ′ and n_{q}′ independently represent an overhang nucleotide;
[0270] wherein N_{b}′ and Y′ do not have the same modification; and
[0271] X′X′X′, Y′Y′Y′, and Z′Z′Z′ each independently represent one motif of three identical modifications on three consecutive nucleotides.

[0272] In some embodiments, the Nₐ′ or N_{b}′ comprises modifications of alternating pattern.

[0273] The Y′Y′Y′ motif occurs at or near the cleavage site of the antisense strand. For example, when the dsRNAi agent has a duplex region of 17-23 nucleotides in length, the Y′Y′Y′ motif can occur at positions 9, 10, 11; 10, 11, 12; 11, 12, 13; 12, 13, 14; or 13, 14, 15 of the antisense strand, with the count starting from the first nucleotide, from the 5′-end; or optionally, the count starting at the first paired nucleotide within the duplex region, from the 5′-end. Preferably, the Y′Y′Y′ motif occurs at positions 11, 12, 13.

[0274] In certain embodiments, Y′Y′Y′ motif is all 2′-OMe modified nucleotides.

[0275] In certain embodiments, k is 1 and l is 0, or k is 0 and l is 1, or both k and l are 1.

[0276] The antisense strand can therefore be represented by the following formulas:

5′ n_{q}′-Nₐ′-Z′Z′Z′-N_{b}′-Y′Y′Y′-Nₐ′-n_{p′} 3′ (IIb);

5′ n_{q}′-Nₐ′-Y′Y′Y′-N_{b}′-X′X′X′-n_{p′} 3′ (IIc); or

5′ n_{q}′-Nₐ′-Z′Z′Z′-N_{b}′-Y′Y′Y′-N_{b}′-X′X′X′-Nₐ′-n_{p′} 3′ (IId).

[0277] When the antisense strand is represented by formula (IIb), N_{b}′ represents an oligonucleotide sequence comprising 0-10, 0-7, 0-10, 0-7, 0-5, 0-4, 0-2, or 0 modified nucleotides. Each Nₐ′ independently represents an oligonucleotide sequence comprising 2-20, 2-15, or 2-10 modified nucleotides.

[0278] When the antisense strand is represented as formula (IIc), N_{b}′ represents an oligonucleotide sequence comprising 0-10, 0-7, 0-10, 0-7, 0-5, 0-4, 0-2, or 0 modified nucleotides. Each Nₐ′ independently represents an oligonucleotide sequence comprising 2-20, 2-15, or 2-10 modified nucleotides.

[0279] When the antisense strand is represented as formula (IId), each N_{b}′ independently represents an oligonucleotide sequence comprising 0-10, 0-7, 0-10, 0-7, 0-5, 0-4, 0-2, or 0 modified nucleotides. Each Nₐ′ independently represents an oligonucleotide sequence comprising 2-20, 2-15, or 2-10 modified nucleotides. Preferably, N_{b} is 0, 1, 2, 3, 4, 5, or 6.

[0280] In other embodiments, k is 0 and l is 0 and the antisense strand may be represented by the formula:

5′ n_{p′}-Nₐ′-Y′Y′Y′-Nₐ′-n_{q′} 3′ (Ia).

[0281] When the antisense strand is represented as formula (IIa), each Nₐ′ independently represents an oligonucleotide sequence comprising 2-20, 2-15, or 2-10 modified nucleotides. Each of X′, Y′ and Z′ may be the same or different from each other.

[0282] Each nucleotide of the sense strand and antisense strand may be independently modified with LNA, CRN, UNA, cEt, HNA, CeNA, 2′-methoxyethyl, 2′-O-methyl, 2′-O-allyl, 2′-C-allyl, 2′-hydroxyl, or 2′-fluoro. For example, each nucleotide of the sense strand and antisense strand is independently modified with 2′-O-methyl or 2′-fluoro. Each X, Y, Z, X′, Y′, and Z′, in particular, may represent a 2′-O-methyl modification or a 2′-fluoro modification.

[0283] In some embodiments, the sense strand of the dsRNAi agent may contain YYY motif occurring at 9, 10, and 11 positions of the strand when the duplex region is 21 nt, the count starting from the first nucleotide from the 5′-end, or optionally, the count starting at the first paired nucleotide within the duplex region, from the 5′-end; and Y represents 2′-F modification. The sense strand may additionally contain XXX motif or ZZZ motifs as wing modifications at the opposite end of the duplex region; and XXX and ZZZ each independently represents a 2′-OMe modification or 2′-F modification.

[0284] In some embodiments the antisense strand may contain Y′Y′Y′ motif occurring at positions 11, 12, 13 of the strand, the count starting from the first nucleotide from the 5′-end, or optionally, the count starting at the first paired nucleotide within the duplex region, from the 5′-end; and Y′ represents 2′-O-methyl modification. The antisense strand may additionally contain X′X′X′ motif or Z′Z′Z′ motifs as wing modifications at the opposite end of the duplex region; and X′X′X′ and Z′Z′Z′ each independently represents a 2′-OMe modification or 2′-F modification.

[0285] The sense strand represented by any one of the above formulas (Ia), (Ib), (Ic), and (Id) forms a duplex with a antisense strand being represented by any one of formulas (IIa), (IIb), (IIc), and (IId), respectively.

[0286] Accordingly, the dsRNAi agents for use in the methods of the invention may comprise a sense strand and an antisense strand, each strand having 14 to 30 nucleotides, the iRNA duplex represented by formula (III):

sense: 5′ nₚ-Nₐ-(XXX)ᵢ-N_{b}-YYY-N_{b}-(ZZZ)ⱼ-Nₐ-n_{q} 3′

antisense: 3′ nₚ′-Nₐ′-(X′X′X′)ₖ-N_{b}′-Y′Y′Y′-N_{b}′-(Z′Z′Z′)ₗ-Nₐ′-n_{q}′ 5′ (III)
[0287] wherein:
[0288] i, j, k, and l are each independently 0 or 1;
[0289] p, p′, q, and q′ are each independently 0-6;
[0290] each Nₐ and Nₐ′ independently represents an oligonucleotide sequence comprising 0-25 modified nucleotides, each sequence comprising at least two differently modified nucleotides;
[0291] each N_{b} and N_{b}′ independently represents an oligonucleotide sequence comprising 0-10 modified nucleotides;
[0292] wherein each nₚ′, nₚ, n_{q}′, and n_{q}, each of which may or may not be present, independently represents an overhang nucleotide; and
[0293] XXX, YYY, ZZZ, X′X′X′, Y′Y′Y′, and Z′Z′Z′ each independently represent one motif of three identical modifications on three consecutive nucleotides.

[0294] In one embodiment, i is 0 and j is 0; or i is 1 and j is 0; or i is 0 and j is 1; or both i and j are 0; or both i and j are 1. In another embodiment, k is 0 and l is 0; or k is 1 and l is 0; k is 0 and l is 1; or both k and l are 0; or both k and l are 1.

[0295] Exemplary combinations of the sense strand and antisense strand forming an iRNA duplex include the formulas below:

5′ nₚ-Nₐ-YYY-Nₐ-n_{q} 3′

3′ nₚ′-Nₐ′-Y′Y′Y′-Nₐ′n_{q}′ 5′ (IIIa)

5′ nₚ-Nₐ-YYY-N_{b}-ZZZ-Nₐ-n_{q} 3′

3′ nₚ′-Nₐ′-Y′Y′Y′-N_{b}′-Z′Z′Z′-Nₐ′n_{q}′ 5′ (IIb)

5′ nₚ-Nₐ-XXX-N_{b}-YYY-Nₐ-n_{q} 3′

3′ nₚ′-Nₐ′-X′X′X′-N_{b}′-Y′Y′Y′-Nₐ′-n_{q}′ 5′(IIc)

5′ nₚ-Nₐ-XXX-N_{b}-YYY-N_{b}-ZZZ-Nₐ-n_{q} 3′

3′ nₚ′-Nₐ′-X′X′X′-N_{b}′-Y′Y′Y′-N_{b}′-Z′Z′Z′-Nₐ-n_{q}′ 5′ (IIId)

[0296] When the dsRNAi agent is represented by formula (IIIa), each Nₐ independently represents an oligonucleotide sequence comprising 2-20, 2-15, or 2-10 modified nucleotides.

[0297] When the dsRNAi agent is represented by formula (IIIb), each N_{b} independently represents an oligonucleotide sequence comprising 1-10, 1-7, 1-5, or 1-4 modified nucleotides. Each Nₐ independently represents an oligonucleotide sequence comprising 2-20, 2-15, or 2-10 modified nucleotides.

[0298] When the dsRNAi agent is represented as formula (IIc), each N_{b}, N_{b}′ independently represents an oligonucleotide sequence comprising 0-10, 0-7, 0-10, 0-7, 0-5, 0-4, 0-2, or 0 modified nucleotides. Each Nₐ independently represents an oligonucleotide sequence comprising 2-20, 2-15, or 2-10 modified nucleotides.

[0299] When the dsRNAi agent is represented as formula (IIId), each N_{b}, N_{b}′ independently represents an oligonucleotide sequence comprising 0-10, 0-7, 0-10, 0-7, 0-5, 0-4, 0-2, or 0 modified nucleotides. Each Nₐ, Nₐ′ independently represents an oligonucleotide sequence comprising 2-20, 2-15, or 2-10 modified nucleotides. Each of Nₐ, Nₐ′, N_{b}, and N_{b}′ independently comprises modifications of alternating pattern.

[0300] Each of X, Y, and Z in formulas (III), (IIIa), (IIIb), (IIc), and (IIId) may be the same or different from each other.

[0301] When the dsRNAi agent is represented by formula (III), (IIIa), (IIIb), (IIIc), and (IIId), at least one of the Y nucleotides may form a base pair with one of the Y′ nucleotides. Alternatively, at least two of the Y nucleotides form base pairs with the corresponding Y′ nucleotides; or all three of the Y nucleotides all form base pairs with the corresponding Y′ nucleotides.

[0302] When the dsRNAi agent is represented by formula (IIIb) or (IIId), at least one of the Z nucleotides may form a base pair with one of the Z′ nucleotides. Alternatively, at least two of the Z nucleotides form base pairs with the corresponding Z′ nucleotides; or all three of the Z nucleotides all form base pairs with the corresponding Z′ nucleotides.

[0303] When the dsRNAi agent is represented as formula (IIIc) or (IIId), at least one of the X nucleotides may form a base pair with one of the X′ nucleotides. Alternatively, at least two of the X nucleotides form base pairs with the corresponding X′ nucleotides; or all three of the X nucleotides all form base pairs with the corresponding X′ nucleotides.

[0304] In certain embodiments, the modification on the Y nucleotide is different than the modification on the Y′ nucleotide, the modification on the Z nucleotide is different than the modification on the Z′ nucleotide, or the modification on the X nucleotide is different than the modification on the X′ nucleotide.

[0305] In certain embodiments, when the dsRNAi agent is represented by formula (IIId), the Nₐ modifications are 2′-O-methyl or 2′-fluoro modifications. In other embodiments, when the RNAi agent is represented by formula (IIId), the Nₐ modifications are 2′-O-methyl or 2′-fluoro modifications and nₚ′>0 and at least one nₚ′ is linked to a neighboring nucleotide a via phosphorothioate linkage. In yet other embodiments, when the RNAi agent is represented by formula (IIId), the Nₐ modifications are 2′-O-methyl or 2′-fluoro modifications, nₚ′>0 and at least one nₚ′ is linked to a neighboring nucleotide via phosphorothioate linkage, and the sense strand is conjugated to one or more GalNAc derivatives attached through a bivalent or trivalent branched linker (described below). In other embodiments, when the RNAi agent is represented by formula (IIId), the Nₐ modifications are 2′-O-methyl or 2′-fluoro modifications, nₚ′>0 and at least one nₚ′ is linked to a neighboring nucleotide via phosphorothioate linkage, the sense strand comprises at least one phosphorothioate linkage, and the sense strand is conjugated to one or more GalNAc derivatives attached through a monovalent, bivalent or trivalent branched linker.

[0306] In some embodiments, when the dsRNAi agent is represented by formula (IIIa), the Nₐ modifications are 2′-O-methyl or 2′-fluoro modifications, nₚ′>0 and at least one nₚ′ is linked to a neighboring nucleotide via phosphorothioate linkage, the sense strand comprises at least one phosphorothioate linkage, and the sense strand is conjugated to one or more GalNAc derivatives attached through a bivalent or trivalent branched linker.

[0307] In some embodiments, the dsRNAi agent is a multimer containing at least two duplexes represented by formula (III), (IIIa), (IIIb), (IIIc), and (IIId), wherein the duplexes are connected by a linker. The linker can be cleavable or non-cleavable. Optionally, the multimer further comprises a ligand. Each of the duplexes can target the same gene or two different genes; or each of the duplexes can target same gene at two different target sites.

[0308] In some embodiments, the dsRNAi agent is a multimer containing three, four, five, six, or more duplexes represented by formula (III), (IIIa), (IIIb), (IIIc), and (IIId), wherein the duplexes are connected by a linker. The linker can be cleavable or non-cleavable. Optionally, the multimer further comprises a ligand. Each of the duplexes can target the same gene or two different genes; or each of the duplexes can target same gene at two different target sites.

[0309] In one embodiment, two dsRNAi agents represented by at least one of formulas (III), (IIIa), (IIIb), (IIIc), and (IIId) are linked to each other at the 5′ end, and one or both of the 3′ ends, and are optionally conjugated to to a ligand. Each of the agents can target the same gene or two different genes; or each of the agents can target same gene at two different target sites.

[0310] Various publications describe multimeric iRNAs that can be used in the methods of the invention. Such publications include WO2007/091269, U.S. Pat. No. 7,858,769, WO2010/141511, WO2007/117686, WO2009/014887, and WO2011/031520 the entire contents of each of which are hereby incorporated herein by reference.

[0311] As described in more detail below, the iRNA that contains conjugations of one or more carbohydrate moieties to an iRNA can optimize one or more properties of the iRNA. In many cases, the carbohydrate moiety will be attached to a modified subunit of the iRNA. For example, the ribose sugar of one or more ribonucleotide subunits of a iRNA can be replaced with another moiety, e.g., a non-carbohydrate (preferably cyclic) carrier to which is attached a carbohydrate ligand. A ribonucleotide subunit in which the ribose sugar of the subunit has been so replaced is referred to herein as a ribose replacement modification subunit (RRMS). A cyclic carrier may be a carbocyclic ring system, i.e., all ring atoms are carbon atoms, or a heterocyclic ring system, i.e., one or more ring atoms may be a heteroatom, e.g., nitrogen, oxygen, sulfur. The cyclic carrier may be a monocyclic ring system, or may contain two or more rings, e.g. fused rings. The cyclic carrier may be a fully saturated ring system, or it may contain one or more double bonds.

[0312] The ligand may be attached to the polynucleotide via a carrier. The carriers include (i) at least one “backbone attachment point,” preferably two “backbone attachment points” and (ii) at least one “tethering attachment point.” A “backbone attachment point” as used herein refers to a functional group, e.g. a hydroxyl group, or generally, a bond available for, and that is suitable for incorporation of the carrier into the backbone, e.g., the phosphate, or modified phosphate, e.g., sulfur containing, backbone, of a ribonucleic acid. A “tethering attachment point” (TAP) in some embodiments refers to a constituent ring atom of the cyclic carrier, e.g., a carbon atom or a heteroatom (distinct from an atom which provides a backbone attachment point), that connects a selected moiety. The moiety can be, e.g., a carbohydrate, e.g. monosaccharide, disaccharide, trisaccharide, tetrasaccharide, oligosaccharide, or polysaccharide. Optionally, the selected moiety is connected by an intervening tether to the cyclic carrier. Thus, the cyclic carrier will often include a functional group, e.g., an amino group, or generally, provide a bond, that is suitable for incorporation or tethering of another chemical entity, e.g., a ligand to the constituent ring.

[0313] The iRNA may be conjugated to a ligand via a carrier, wherein the carrier can be cyclic group or acyclic group; preferably, the cyclic group is selected from pyrrolidinyl, pyrazolinyl, pyrazolidinyl, imidazolinyl, imidazolidinyl, piperidinyl, piperazinyl, [1,3]dioxolane, oxazolidinyl, isoxazolidinyl, morpholinyl, thiazolidinyl, isothiazolidinyl, quinoxalinyl, pyridazinonyl, tetrahydrofuryl, and decalin; preferably, the acyclic group is a serinol backbone or diethanolamine backbone.

[0314] In certain embodiments, the iRNA for use in the methods of the invention is an agent selected from agents listed in Table 3 or Table 5. These agents may further comprise a ligand.

### III. iRNAs Conjugated to Ligands

[0315] Another modification of the RNA of an iRNA of the invention involves chemically linking to the iRNA one or more ligands, moieties or conjugates that enhance the activity, cellular distribution, or cellular uptake of the iRNA e.g., into a cell. Such moieties include but are not limited to lipid moieties such as a cholesterol moiety (Letsinger et al., Proc. Natl. Acid. Sci. USA, 1989, 86: 6553-6556), cholic acid (Manoharan et al., Biorg. Med. Chem. Let., 1994, 4:1053-1060), a thioether, e.g., beryl-S-tritylthiol (Manoharan et al., Ann. N.Y. Acad. Sci., 1992, 660:306-309; Manoharan et al., Biorg. Med. Chem. Let., 1993, 3:2765-2770), a thiocholesterol (Oberhauser et al., Nucl. Acids Res., 1992, 20:533-538), an aliphatic chain, e.g., dodecandiol or undecyl residues (Saison-Behmoaras et al., EMBO J, 1991, 10:1111-1118; Kabanov et al., FEBS Lett., 1990, 259:327-330; Svinarchuk et al., Biochimie, 1993, 75:49-54), a phospholipid, e.g., di-hexadecyl-rac-glycerol or triethyl-ammonium 1,2-di-O-hexadecyl-rac-glycero-3-phosphonate (Manoharan et al., Tetrahedron Lett., 1995, 36:3651-3654; Shea et al., Nucl. Acids Res., 1990, 18:3777-3783), a polyamine or a polyethylene glycol chain (Manoharan et al., Nucleosides & Nucleotides, 1995, 14:969-973), or adamantane acetic acid (Manoharan et al., Tetrahedron Lett., 1995, 36:3651-3654), a palmityl moiety (Mishra et al., Biochim. Biophys. Acta, 1995, 1264:229-237), or an octadecylamine or hexylamino-carbonyloxycholesterol moiety (Crooke et al., J. Pharmacol. Exp. Ther., 1996, 277:923-937).

[0316] In certain embodiments, a ligand alters the distribution, targeting or lifetime of an iRNA agent into which it is incorporated. In preferred embodiments a ligand provides an enhanced affinity for a selected target, e.g., molecule, cell or cell type, compartment, e.g., a cellular or organ compartment, tissue, organ or region of the body, as, e.g., compared to a species absent such a ligand. Preferred ligands do not take part in duplex pairing in a duplexed nucleic acid.

[0317] Ligands can include a naturally occurring substance, such as a protein (e.g., human serum albumin (HSA), low-density lipoprotein (LDL), or globulin); carbohydrate (e.g., a dextran, pullulan, chitin, chitosan, inulin, cyclodextrin, N-acetylgalactosamine, or hyaluronic acid); or a lipid. The ligand can also be a recombinant or synthetic molecule, such as a synthetic polymer, e.g., a synthetic polyamino acid. Examples of polyamino acids include polyamino acid is a polylysine (PLL), poly L-aspartic acid, poly L-glutamic acid, styrene-maleic acid anhydride copolymer, poly(L-lactide-co-glycolied) copolymer, divinyl ether-maleic anhydride copolymer, N-(2-hydroxypropyl)methacrylamide copolymer (HMPA), polyethylene glycol (PEG), polyvinyl alcohol (PVA), polyurethane, poly(2-ethylacryllic acid), N-isopropylacrylamide polymers, or polyphosphazine. Example of polyamines include: polyethylenimine, polylysine (PLL), spermine, spermidine, polyamine, pseudopeptide-polyamine, peptidomimetic polyamine, dendrimer polyamine, arginine, amidine, protamine, cationic lipid, cationic porphyrin, quaternary salt of a polyamine, or an alpha helical peptide.

[0318] Ligands can also include targeting groups, e.g., a cell or tissue targeting agent, e.g., a lectin, glycoprotein, lipid or protein, e.g., an antibody, that binds to a specified cell type such as a kidney cell. A targeting group can be a thyrotropin, melanotropin, lectin, glycoprotein, surfactant protein A, Mucin carbohydrate, multivalent lactose, multivalent galactose, N-acetyl-galactosamine, N-acetyl-gulucoseamine multivalent mannose, multivalent fucose, glycosylated polyaminoacids, multivalent galactose, transferrin, bisphosphonate, polyglutamate, polyaspartate, a lipid, cholesterol, a steroid, bile acid, folate, vitamin B12, vitamin A, biotin, or an RGD peptide or RGD peptide mimetic.

[0319] Other examples of ligands include dyes, intercalating agents (e.g. acridines), cross-linkers (e.g. psoralene, mitomycin C), porphyrins (TPPC4, texaphyrin, Sapphyrin), polycyclic aromatic hydrocarbons (e.g., phenazine, dihydrophenazine), artificial endonucleases (e.g. EDTA), lipophilic molecules, e.g., cholesterol, cholic acid, adamantane acetic acid, 1-pyrene butyric acid, dihydrotestosterone, 1,3-Bis-O(hexadecyl)glycerol, geranyloxyhexyl group, hexadecylglycerol, borneol, menthol, 1,3-propanediol, heptadecyl group, palmitic acid, myristic acid,O3-(oleoyl)lithocholic acid, O3-(oleoyl)cholenic acid, dimethoxytrityl, or phenoxazine) and peptide conjugates (e.g., antennapedia peptide, Tat peptide), alkylating agents, phosphate, amino, mercapto, PEG (e.g., PEG-40K), MPEG, [MPEG]₂, polyamino, alkyl, substituted alkyl, radiolabeled markers, enzymes, haptens (e.g. biotin), transport/absorption facilitators (e.g., aspirin, vitamin E, folic acid), synthetic ribonucleases (e.g., imidazole, bisimidazole, histamine, imidazole clusters, acridine-imidazole conjugates, Eu3+ complexes of tetraazamacrocycles), dinitrophenyl, HRP, or AP.

[0320] Ligands can be proteins, e.g., glycoproteins, or peptides, e.g., molecules having a specific affinity for a co-ligand, or antibodies e.g., an antibody, that binds to a specified cell type such as a hepatic cell. Ligands can also include hormones and hormone receptors. They can also include non-peptidic species, such as lipids, lectins, carbohydrates, vitamins, cofactors, multivalent lactose, multivalent galactose, N-acetyl-galactosamine, N-acetyl-gulucosamine multivalent mannose, or multivalent fucose. The ligand can be, for example, a lipopolysaccharide, an activator of p38 MAP kinase, or an activator of NF-κB.

[0321] The ligand can be a substance, e.g., a drug, which can increase the uptake of the iRNA agent into the cell, for example, by disrupting the cell's cytoskeleton, e.g., by disrupting the cell's microtubules, microfilaments, or intermediate filaments. The drug can be, for example, taxon, vincristine, vinblastine, cytochalasin, nocodazole, japlakinolide, latrunculin A, phalloidin, swinholide A, indanocine, or myoservin.

[0322] In some embodiments, a ligand attached to an iRNA as described herein acts as a pharmacokinetic modulator (PK modulator). PK modulators include lipophiles, bile acids, steroids, phospholipid analogues, peptides, protein binding agents, PEG, vitamins etc. Exemplary PK modulators include, but are not limited to, cholesterol, fatty acids, cholic acid, lithocholic acid, dialkylglycerides, diacylglyceride, phospholipids, sphingolipids, naproxen, ibuprofen, vitamin E, biotin etc. Oligonucleotides that comprise a number of phosphorothioate linkages are also known to bind to serum protein, thus short oligonucleotides, e.g., oligonucleotides of about 5 bases, 10 bases, 15 bases, or 20 bases, comprising multiple of phosphorothioate linkages in the backbone are also amenable to the present invention as ligands (e.g. as PK modulating ligands). In addition, aptamers that bind serum components (e.g. serum proteins) are also suitable for use as PK modulating ligands in the embodiments described herein.

[0323] Ligand-conjugated iRNAs of the invention may be synthesized by the use of an oligonucleotide that bears a pendant reactive functionality, such as that derived from the attachment of a linking molecule onto the oligonucleotide (described below). This reactive oligonucleotide may be reacted directly with commercially-available ligands, ligands that are synthesized bearing any of a variety of protecting groups, or ligands that have a linking moiety attached thereto.

[0324] The oligonucleotides used in the conjugates of the present invention may be conveniently and routinely made through the well-known technique of solid-phase synthesis. Equipment for such synthesis is sold by several vendors including, for example, Applied Biosystems (Foster City, Calif.). Any other means for such synthesis known in the art may additionally or alternatively be employed. It is also known to use similar techniques to prepare other oligonucleotides, such as the phosphorothioates and alkylated derivatives.

[0325] In the ligand-conjugated iRNAs and ligand-molecule bearing sequence-specific linked nucleosides of the present invention, the oligonucleotides and oligonucleosides may be assembled on a suitable DNA synthesizer utilizing standard nucleotide or nucleoside precursors, or nucleotide or nucleoside conjugate precursors that already bear the linking moiety, ligand-nucleotide or nucleoside-conjugate precursors that already bear the ligand molecule, or non-nucleoside ligand-bearing building blocks.

[0326] When using nucleotide-conjugate precursors that already bear a linking moiety, the synthesis of the sequence-specific linked nucleosides is typically completed, and the ligand molecule is then reacted with the linking moiety to form the ligand-conjugated oligonucleotide. In some embodiments, the oligonucleotides or linked nucleosides of the present invention are synthesized by an automated synthesizer using phosphoramidites derived from ligand-nucleoside conjugates in addition to the standard phosphoramidites and non-standard phosphoramidites that are commercially available and routinely used in oligonucleotide synthesis.

[0327] A. Lipid Conjugates

[0328] In certain embodiments, the ligand or conjugate is a lipid or lipid-based molecule. Such a lipid or lipid-based molecule preferably binds a serum protein, e.g., human serum albumin (HSA). An HSA binding ligand allows for distribution of the conjugate to a target tissue, e.g., a non-kidney target tissue of the body. For example, the target tissue can be the liver, including parenchymal cells of the liver. Other molecules that can bind HSA can also be used as ligands. For example, naproxen or aspirin can be used. A lipid or lipid-based ligand can (a) increase resistance to degradation of the conjugate, (b) increase targeting or transport into a target cell or cell membrane, or (c) can be used to adjust binding to a serum protein, e.g., HSA.

[0329] A lipid based ligand can be used to inhibit, e.g., control the binding of the conjugate to a target tissue. For example, a lipid or lipid-based ligand that binds to HSA more strongly will be less likely to be targeted to the kidney and therefore less likely to be cleared from the body. A lipid or lipid-based ligand that binds to HSA less strongly can be used to target the conjugate to the kidney.

[0330] In certain embodiments, the lipid based ligand binds HSA. Preferably, it binds HSA with a sufficient affinity such that the conjugate will be preferably distributed to a non-kidney tissue. However, it is preferred that the affinity not be so strong that the HSA-ligand binding cannot be reversed.

[0331] In other embodiments, the lipid based ligand binds HSA weakly or not at all, such that the conjugate will be preferably distributed to the kidney. Other moieties that target to kidney cells can also be used in place of, or in addition to, the lipid based ligand.

[0332] In another aspect, the ligand is a moiety, e.g., a vitamin, which is taken up by a target cell, e.g., a proliferating cell. These are particularly useful for treating disorders characterized by unwanted cell proliferation, e.g., of the malignant or non-malignant type, e.g., cancer cells. Exemplary vitamins include vitamin A, E, and K. Other exemplary vitamins include are B vitamin, e.g., folic acid, B12, riboflavin, biotin, pyridoxal or other vitamins or nutrients taken up by target cells such as liver cells. Also included are HSA and low density lipoprotein (LDL).

[0333] B. Cell Permeation Agents

[0334] In another aspect, the ligand is a cell-permeation agent, preferably a helical cell-permeation agent. Preferably, the agent is amphipathic. An exemplary agent is a peptide such as tat or antennopedia. If the agent is a peptide, it can be modified, including a peptidylmimetic, invertomers, non-peptide or pseudo-peptide linkages, and use of D-amino acids. The helical agent is preferably an alpha-helical agent, which preferably has a lipophilic and a lipophobic phase.

[0335] The ligand can be a peptide or peptidomimetic. A peptidomimetic (also referred to herein as an oligopeptidomimetic) is a molecule capable of folding into a defined three-dimensional structure similar to a natural peptide. The attachment of peptide and peptidomimetics to iRNA agents can affect pharmacokinetic distribution of the iRNA, such as by enhancing cellular recognition and absorption. The peptide or peptidomimetic moiety can be about 5-50 amino acids long, e.g., about 5, 10, 15, 20, 25, 30, 35, 40, 45, or 50 amino acids long.

[0336] A peptide or peptidomimetic can be, for example, a cell permeation peptide, cationic peptide, amphipathic peptide, or hydrophobic peptide (e.g., consisting primarily of Tyr, Trp, or Phe). The peptide moiety can be a dendrimer peptide, constrained peptide or crosslinked peptide. In another alternative, the peptide moiety can include a hydrophobic membrane translocation sequence (MTS). An exemplary hydrophobic MTS-containing peptide is RFGF having the amino acid sequence AAVALLPAVLLALLAP (SEQ ID NO: 13). An RFGF analogue (e.g., amino acid sequence AALLPVLLAAP (SEQ ID NO:14) containing a hydrophobic MTS can also be a targeting moiety. The peptide moiety can be a “delivery” peptide, which can carry large polar molecules including peptides, oligonucleotides, and protein across cell membranes. For example, sequences from the HIV Tat protein (GRKKRRQRRRPPQ (SEQ ID NO:15) and the Drosophila Antennapedia protein (RQIKIWFQNRRMKWKK (SEQ ID NO:16) have been found to be capable of functioning as delivery peptides. A peptide or peptidomimetic can be encoded by a random sequence of DNA, such as a peptide identified from a phage-display library, or one-bead-one-compound (OBOC) combinatorial library (Lam et al., Nature, 354:82-84, 1991). Examples of a peptide or peptidomimetic tethered to a dsRNA agent via an incorporated monomer unit for cell targeting purposes is an arginine-glycine-aspartic acid (RGD)-peptide, or RGD mimic. A peptide moiety can range in length from about 5 amino acids to about 40 amino acids. The peptide moieties can have a structural modification, such as to increase stability or direct conformational properties. Any of the structural modifications described below can be utilized.

[0337] An RGD peptide for use in the compositions and methods of the invention may be linear or cyclic, and may be modified, e.g., glycosylated or methylated, to facilitate targeting to a specific tissue(s). RGD-containing peptides and peptidiomimemtics may include D-amino acids, as well as synthetic RGD mimics. In addition to RGD, one can use other moieties that target the integrin ligand. Preferred conjugates of this ligand target PECAM-1 or VEGF.

[0338] A “cell permeation peptide” is capable of permeating a cell, e.g., a microbial cell, such as a bacterial or fungal cell, or a mammalian cell, such as a human cell. A microbial cell-permeating peptide can be, for example, an α-helical linear peptide (e.g., LL-37 or Ceropin P1), a disulfide bond-containing peptide (e.g., a-defensin, β-defensin or bactenecin), or a peptide containing only one or two dominating amino acids (e.g., PR-39 or indolicidin). A cell permeation peptide can also include a nuclear localization signal (NLS). For example, a cell permeation peptide can be a bipartite amphipathic peptide, such as MPG, which is derived from the fusion peptide domain of HIV-1 gp41 and the NLS of SV40 large T antigen (Simeoni et al., Nucl. Acids Res. 31:2717-2724, 2003).

[0339] C. Carbohydrate Conjugates

[0340] In some embodiments of the compositions and methods of the invention, an iRNA further comprises a carbohydrate. The carbohydrate conjugated iRNA is advantageous for the in vivo delivery of nucleic acids, as well as compositions suitable for in vivo therapeutic use, as described herein. As used herein, “carbohydrate” refers to a compound which is either a carbohydrate per se made up of one or more monosaccharide units having at least 6 carbon atoms (which can be linear, branched or cyclic) with an oxygen, nitrogen or sulfur atom bonded to each carbon atom; or a compound having as a part thereof a carbohydrate moiety made up of one or more monosaccharide units each having at least six carbon atoms (which can be linear, branched or cyclic), with an oxygen, nitrogen or sulfur atom bonded to each carbon atom. Representative carbohydrates include the sugars (mono-, di-, tri-, and oligosaccharides containing from about 4, 5, 6, 7, 8, or 9 monosaccharide units), and polysaccharides such as starches, glycogen, cellulose and polysaccharide gums. Specific monosaccharides include HBV and above (e.g., HBV, C6, C7, or C8) sugars; di- and trisaccharides include sugars having two or three monosaccharide units (e.g., HBV, C6, C7, or C8).

[0341] In certain embodiments, a carbohydrate conjugate for use in the compositions and methods of the invention is a monosaccharide. In one embodiment, the monosaccharide is an N-acetylgalactosamine, such as

[chemical structure]

[0342] In other embodiments, a carbohydrate conjugate for use in the compositions and methods of the invention is selected from the group:

[chemical structure]

[chemical structure]

[chemical structure]

[chemical structure]

[0343] Another representative carbohydrate conjugate for use in the embodiments described herein includes but is not limited to

[chemical structure]

[0344] (Formula XXIII), when one of X or Y is an oligonucleotide, the other is a hydrogen.

[0345] In certain embodiments of the invention, the GalNAc or GalNAc derivative is attached to an iRNA agent of the invention via a monovalent linker. In some embodiments, the GalNAc or GalNAc derivative is attached to an iRNA agent of the invention via a bivalent linker. In yet other embodiments of the invention, the GalNAc or GalNAc derivative is attached to an iRNA agent of the invention via a trivalent linker.

[0346] In one embodiment, the double stranded RNAi agents of the invention comprise one GalNAc or GalNAc derivative attached to the iRNA agent. In another embodiment, the double stranded RNAi agents of the invention comprise a plurality (e.g., 2, 3, 4, 5, or 6) GalNAc or GalNAc derivatives, each independently attached to a plurality of nucleotides of the double stranded RNAi agent through a plurality of monovalent linkers.

[0347] In some embodiments, for example, when the two strands of an iRNA agent of the invention are part of one larger molecule connected by an uninterrupted chain of nucleotides between the 3′-end of one strand and the 5′-end of the respective other strand forming a hairpin loop comprising, a plurality of unpaired nucleotides, each unpaired nucleotide within the hairpin loop may independently comprise a GalNAc or GalNAc derivative attached via a monovalent linker.

[0348] In some embodiments, the carbohydrate conjugate further comprises one or more additional ligands as described above, such as, but not limited to, a PK modulator or a cell permeation peptide.

[0349] Additional carbohydrate conjugates suitable for use in the present invention include those described in PCT Publication Nos. WO 2014/179620 and WO 2014/179627, the entire contents of each of which are incorporated herein by reference.

[0350] D. Linkers

[0351] In some embodiments, the conjugate or ligand described herein can be attached to an iRNA oligonucleotide with various linkers that can be cleavable or non-cleavable.

[0352] The term “linker” or “linking group” means an organic moiety that connects two parts of a compound, e.g., covalently attaches two parts of a compound. Linkers typically comprise a direct bond or an atom such as oxygen or sulfur, a unit such as NR8, C(O), C(O)NH, SO, SO₂, SO₂NH or a chain of atoms, such as, but not limited to, substituted or unsubstituted alkyl, substituted or unsubstituted alkenyl, substituted or unsubstituted alkynyl, arylalkyl, arylalkenyl, arylalkynyl, heteroarylalkyl, heteroarylalkenyl, heteroarylalkynyl, heterocyclylalkyl, heterocyclylalkenyl, heterocyclylalkynyl, aryl, heteroaryl, heterocyclyl, cycloalkyl, cycloalkenyl, alkylarylalkyl, alkylarylalkenyl, alkylarylalkynyl, alkenylarylalkyl, alkenylarylalkenyl, alkenylarylalkynyl, alkynylarylalkyl, alkynylarylalkenyl, alkynylarylalkynyl, alkylheteroarylalkyl, alkylheteroarylalkenyl, alkylheteroarylalkynyl, alkenylheteroarylalkyl, alkenylheteroarylalkenyl, alkenylheteroarylalkynyl, alkynylheteroarylalkyl, alkynylheteroarylalkenyl, alkynylheteroarylalkynyl, alkylheterocyclylalkyl, alkylheterocyclylalkenyl, alkylhererocyclylalkynyl, alkenylheterocyclylalkyl, alkenylheterocyclylalkenyl, alkenylheterocyclylalkynyl, alkynylheterocyclylalkyl, alkynylheterocyclylalkenyl, alkynylheterocyclylalkynyl, alkylaryl, alkenylaryl, alkynylaryl, alkylheteroaryl, alkenylheteroaryl, alkynylhereroaryl, which one or more methylenes can be interrupted or terminated by O, S, S(O), SO₂, N(R8), C(O), substituted or unsubstituted aryl, substituted or unsubstituted heteroaryl, or substituted or unsubstituted heterocyclic; where R8 is hydrogen, acyl, aliphatic, or substituted aliphatic. In one embodiment, the linker is between about 1-24 atoms, 2-24, 3-24, 4-24, 5-24, 6-24, 6-18, 7-18, 8-18, 7-17, 8-17, 6-16, 7-16, or 8-16 atoms.

[0353] A cleavable linking group is one which is sufficiently stable outside the cell, but which upon entry into a target cell is cleaved to release the two parts the linker is holding together. In a preferred embodiment, the cleavable linking group is cleaved at least about 10 times, 20, times, 30 times, 40 times, 50 times, 60 times, 70 times, 80 times, 90 times, or 100 times faster in a target cell or under a first reference condition (which can, e.g., be selected to mimic or represent intracellular conditions) than in the blood of a subject, or under a second reference condition (which can, e.g., be selected to mimic or represent conditions found in the blood or serum).

[0354] Cleavable linking groups are susceptible to cleavage agents, e.g., pH, redox potential, or the presence of degradative molecules. Generally, cleavage agents are more prevalent or found at higher levels or activities inside cells than in serum or blood. Examples of such degradative agents include: redox agents which are selected for particular substrates or which have no substrate specificity, including, e.g., oxidative or reductive enzymes or reductive agents such as mercaptans, present in cells, that can degrade a redox cleavable linking group by reduction; esterases; endosomes or agents that can create an acidic environment, e.g., those that result in a pH of five or lower; enzymes that can hydrolyze or degrade an acid cleavable linking group by acting as a general acid, peptidases (which can be substrate specific), and phosphatases.

[0355] A cleavable linkage group, such as a disulfide bond can be susceptible to pH. The pH of human serum is 7.4, while the average intracellular pH is slightly lower, ranging from about 7.1-7.3. Endosomes have a more acidic pH, in the range of 5.5-6.0, and lysosomes have an even more acidic pH at around 5.0. Some linkers will have a cleavable linking group that is cleaved at a preferred pH, thereby releasing a cationic lipid from the ligand inside the cell, or into the desired compartment of the cell.

[0356] A linker can include a cleavable linking group that is cleavable by a particular enzyme. The type of cleavable linking group incorporated into a linker can depend on the cell to be targeted. For example, a liver-targeting ligand can be linked to a cationic lipid through a linker that includes an ester group. Liver cells are rich in esterases, and therefore the linker will be cleaved more efficiently in liver cells than in cell types that are not esterase-rich. Other cell-types rich in esterases include cells of the lung, renal cortex, and testis.

[0357] Linkers that contain peptide bonds can be used when targeting cell types rich in peptidases, such as liver cells and synoviocytes.

[0358] In general, the suitability of a candidate cleavable linking group can be evaluated by testing the ability of a degradative agent (or condition) to cleave the candidate linking group. It will also be desirable to also test the candidate cleavable linking group for the ability to resist cleavage in the blood or when in contact with other non-target tissue. Thus, one can determine the relative susceptibility to cleavage between a first and a second condition, where the first is selected to be indicative of cleavage in a target cell and the second is selected to be indicative of cleavage in other tissues or biological fluids, e.g., blood or serum. The evaluations can be carried out in cell free systems, in cells, in cell culture, in organ or tissue culture, or in whole animals. It can be useful to make initial evaluations in cell-free or culture conditions and to confirm by further evaluations in whole animals. In preferred embodiments, useful candidate compounds are cleaved at least about 2, 4, 10, 20, 30, 40, 50, 60, 70, 80, 90, or 100 times faster in the cell (or under in vitro conditions selected to mimic intracellular conditions) as compared to blood or serum (or under in vitro conditions selected to mimic extracellular conditions).

[0359] i. Redox Cleavable Linking Groups

[0360] In certain embodiments, a cleavable linking group is a redox cleavable linking group that is cleaved upon reduction or oxidation. An example of reductively cleavable linking group is a disulphide linking group (—S—S—). To determine if a candidate cleavable linking group is a suitable “reductively cleavable linking group,” or for example is suitable for use with a particular iRNA moiety and particular targeting agent one can look to methods described herein. For example, a candidate can be evaluated by incubation with dithiothreitol (DTT), or other reducing agent using reagents know in the art, which mimic the rate of cleavage which would be observed in a cell, e.g., a target cell. The candidates can also be evaluated under conditions which are selected to mimic blood or serum conditions. In one, candidate compounds are cleaved by at most about 10% in the blood. In other embodiments, useful candidate compounds are degraded at least about 2, 4, 10, 20, 30, 40, 50, 60, 70, 80, 90, or about 100 times faster in the cell (or under in vitro conditions selected to mimic intracellular conditions) as compared to blood (or under in vitro conditions selected to mimic extracellular conditions). The rate of cleavage of candidate compounds can be determined using standard enzyme kinetics assays under conditions chosen to mimic intracellular media and compared to conditions chosen to mimic extracellular media.

[0361] ii. Phosphate-Based Cleavable Linking Groups

[0362] In other embodiments, a cleavable linker comprises a phosphate-based cleavable linking group. A phosphate-based cleavable linking group is cleaved by agents that degrade or hydrolyze the phosphate group. An example of an agent that cleaves phosphate groups in cells are enzymes such as phosphatases in cells. Examples of phosphate-based linking groups are —O—P(O)(ORk)-O—, —O—P(S)(ORk)-O—, —O—P(S)(SRk)-O—, —S—P(O)(ORk)-O—, —O—P(O)(ORk)-S—, —S—P(O)(ORk)-S—, —O—P(S)(ORk)-S—, —S—P(S)(ORk)-O—, —O—P(O)(Rk)-O—, —O—P(S)(Rk)-O—, —S—P(O)(Rk)-O—, —S—P(S)(Rk)-O—, —S—P(O)(Rk)-S—, —O—P(S)(Rk)-S—. Preferred embodiments are —O—P(O)(OH)—O—, —O—P(S)(OH)—O—, —O—P(S)(SH)—O—, —S—P(O)(OH)—O—, —O—P(O)(OH)—S—, —S—P(O)(OH)—S—, —O—P(S)(OH)—S—, —S—P(S)(OH)—O—, —O—P(O)(H)—O—, —O—P(S)(H)—O—, —S—P(O)(H)—O, —S—P(S)(H)—O—, —S—P(O)(H)—S—, and —O—P(S)(H)—S—. A preferred embodiment is —O—P(O)(OH)—O—. These candidates can be evaluated using methods analogous to those described above.

[0363] iii. Acid Cleavable Linking Groups

[0364] In other embodiments, a cleavable linker comprises an acid cleavable linking group. An acid cleavable linking group is a linking group that is cleaved under acidic conditions. In preferred embodiments acid cleavable linking groups are cleaved in an acidic environment with a pH of about 6.5 or lower (e.g., about 6.0, 5.5, 5.0, or lower), or by agents such as enzymes that can act as a general acid. In a cell, specific low pH organelles, such as endosomes and lysosomes can provide a cleaving environment for acid cleavable linking groups. Examples of acid cleavable linking groups include but are not limited to hydrazones, esters, and esters of amino acids. Acid cleavable groups can have the general formula —C═NN—, C(O)O, or —OC(O). A preferred embodiment is when the carbon attached to the oxygen of the ester (the alkoxy group) is an aryl group, substituted alkyl group, or tertiary alkyl group such as dimethyl pentyl or t-butyl. These candidates can be evaluated using methods analogous to those described above.

[0365] iv. Ester-Based Linking Groups

[0366] In other embodiments, a cleavable linker comprises an ester-based cleavable linking group. An ester-based cleavable linking group is cleaved by enzymes such as esterases and amidases in cells. Examples of ester-based cleavable linking groups include, but are not limited to, esters of alkylene, alkenylene and alkynylene groups. Ester cleavable linking groups have the general formula —C(O)O—, or —OC(O)—. These candidates can be evaluated using methods analogous to those described above.

[0367] v. Peptide-Based Cleaving Groups

[0368] In yet other embodiments, a cleavable linker comprises a peptide-based cleavable linking group. A peptide-based cleavable linking group is cleaved by enzymes such as peptidases and proteases in cells. Peptide-based cleavable linking groups are peptide bonds formed between amino acids to yield oligopeptides (e.g., dipeptides, tripeptides etc.) and polypeptides. Peptide-based cleavable groups do not include the amide group (—C(O)NH—). The amide group can be formed between any alkylene, alkenylene or alkynelene. A peptide bond is a special type of amide bond formed between amino acids to yield peptides and proteins. The peptide based cleavage group is generally limited to the peptide bond (i.e., the amide bond) formed between amino acids yielding peptides and proteins and does not include the entire amide functional group. Peptide-based cleavable linking groups have the general formula —NHCHRAC(O)NHCHRBC(O)—, where RA and RB are the R groups of the two adjacent amino acids. These candidates can be evaluated using methods analogous to those described above.

[0369] In some embodiments, an iRNA of the invention is conjugated to a carbohydrate through a linker. Non-limiting examples of iRNA carbohydrate conjugates with linkers of the compositions and methods of the invention include, but are not limited to,

[chemical structure]

[chemical structure]

[0370] when one of X or Y is an oligonucleotide, the other is a hydrogen.

[0371] In certain embodiments of the compositions and methods of the invention, a ligand is one or more “GalNAc” (N-acetylgalactosamine) derivatives attached through a bivalent or trivalent branched linker.

[0372] In certain embodiments, a dsRNA of the invention is conjugated to a bivalent or trivalent branched linker selected from the group of structures shown in any of formula (XXXII)-(XXXV):

[chemical structure]

wherein:
[0373] q2A, q2B, q3A, q3B, q4A, q4B, q5A, q5B and q5C represent independently for each occurrence 0-20 and wherein the repeating unit can be the same or different;
[0374] P^{2A}, P^{2B}, P^{3A}, P^{3B}, P^{4A}, P^{4B}, P^{5A}, P^{5B}, P^{5C}. T^{2A}, T^{2B}, T^{3A}, T^{3B}, T^{4A}, T^{4B}, T^{4A}, T^{5B}, T^{5C} are each independently for each occurrence absent, CO, NH, O, S, OC(O), NHC(O), CH₂, CH₂NH, or CH₂O;
[0375] Q^{2A}, Q^{2B}, Q^{3A}, Q^{3B}, Q^{4A}, Q^{4B}, Q^{5A}, Q^{5B}, Q^{5C} are independently for each occurrence absent, alkylene, substituted alkylene wherin one or more methylenes can be interrupted or terminated by one or more of O, S, S(O), SO₂, N(R^{N}), C(R′)═C(R″), C≡C, or C(O);
[0376] R^{2A}, R^{2B}, R^{3A}, R^{3B}, R^{4A}, R^{4B}, R^{5A}, R^{5B}, R^{5C} are each independently for each occurrence absent, NH, O, S, CH₂, C(O)O, C(O)NH, NHCH(R^{a})C(O), —C(O)—CH(R^{a})—NH—, CO, CH—N—O,

[chemical structure]

or
heterocyclyl;
[0377] L^{2A}, L^{2B}, L^{3A}, L^{3B}, L^{4A}, L^{4B}, L^{5A}, L^{5B}, and L⁵c represent the ligand; i.e. each independently for each occurrence a monosaccharide (such as GalNAc), disaccharide, trisaccharide, tetrasaccharide, oligosaccharide, or polysaccharide; and R^{a} is H or amino acid side chain. Trivalent conjugating GalNAc derivatives are particularly useful for use with RNAi agents for inhibiting the expression of a target gene, such as those of formula (XXXV):

[chemical structure]

[0378] wherein L^{5A} L^{5B} and L^{5C} represent a monosaccharide, such as GalNAc derivative.

[0379] Examples of suitable bivalent and trivalent branched linker groups conjugating GalNAc derivatives include, but are not limited to, the structures recited above as formulas II, VII, XI, X, and XIII.

[0380] Representative US Patents that teach the preparation of RNA conjugates include, but are not limited to, U.S. Pat. Nos. 4,828,979; 4,948,882; 5,218,105; 5,525,465; 5,541,313; 5,545,730; 5,552,538; 5,578,717, 5,580,731; 5,591,584; 5,109,124; 5,118,802; 5,138,045; 5,414,077; 5,486,603; 5,512,439; 5,578,718; 5,608,046; 4,587,044; 4,605,735; 4,667,025; 4,762,779; 4,789,737; 4,824,941; 4,835,263; 4,876,335; 4,904,582; 4,958,013; 5,082,830; 5,112,963; 5,214,136; 5,082,830; 5,112,963; 5,214,136; 5,245,022; 5,254,469; 5,258,506; 5,262,536; 5,272,250; 5,292,873; 5,317,098; 5,371,241, 5,391,723; 5,416,203, 5,451,463; 5,510,475; 5,512,667; 5,514,785; 5,565,552; 5,567,810; 5,574,142; 5,585,481; 5,587,371; 5,595,726; 5,597,696; 5,599,923; 5,599,928; 5,688,941; 6,294,664; 6,320,017; 6,576,752; 6,783,931; 6,900,297; 7,037,646; and 8,106,022, the entire contents of each of which are hereby incorporated herein by reference.

[0381] It is not necessary for all positions in a given compound to be uniformly modified, and in fact more than one of the aforementioned modifications can be incorporated in a single compound or even at a single nucleoside within an iRNA. The present invention also includes iRNA compounds that are chimeric compounds.

[0382] “Chimeric” iRNA compounds or “chimeras,” in the context of this invention, are iRNA compounds, preferably dsRNAi agents, that contain two or more chemically distinct regions, each made up of at least one monomer unit, i.e., a nucleotide in the case of a dsRNA compound. These iRNAs typically contain at least one region wherein the RNA is modified so as to confer upon the iRNA increased resistance to nuclease degradation, increased cellular uptake, or increased binding affinity for the target nucleic acid. An additional region of the iRNA can serve as a substrate for enzymes capable of cleaving RNA:DNA or RNA:RNA hybrids. By way of example, RNase H is a cellular endonuclease which cleaves the RNA strand of an RNA:DNA duplex. Activation of RNase H, therefore, results in cleavage of the RNA target, thereby greatly enhancing the efficiency of iRNA inhibition of gene expression. Consequently, comparable results can often be obtained with shorter iRNAs when chimeric dsRNAs are used, compared to phosphorothioate deoxy dsRNAs hybridizing to the same target region. Cleavage of the RNA target can be routinely detected by gel electrophoresis and, if necessary, associated nucleic acid hybridization techniques known in the art.

[0383] In certain instances, the RNA of an iRNA can be modified by a non-ligand group. A number of non-ligand molecules have been conjugated to iRNAs in order to enhance the activity, cellular distribution or cellular uptake of the iRNA, and procedures for performing such conjugations are available in the scientific literature. Such non-ligand moieties have included lipid moieties, such as cholesterol (Kubo, T. et al., Biochem. Biophys. Res. Comm., 2007, 365(1):54-61; Letsinger et al., Proc. Natl. Acad. Sci. USA, 1989, 86:6553), cholic acid (Manoharan et al., Bioorg. Med. Chem. Lett., 1994, 4:1053), a thioether, e.g., hexyl-S-tritylthiol (Manoharan et al., Ann. N.Y. Acad. Sci., 1992, 660:306; Manoharan et al., Bioorg. Med. Chem. Let., 1993, 3:2765), a thiocholesterol (Oberhauser et al., Nucl. Acids Res., 1992, 20:533), an aliphatic chain, e.g., dodecandiol or undecyl residues (Saison-Behmoaras et al., EMBO J., 1991, 10:111; Kabanov et al., FEBS Lett., 1990, 259:327; Svinarchuk et al., Biochimie, 1993, 75:49), a phospholipid, e.g., di-hexadecyl-rac-glycerol or triethylammonium 1,2-di-O-hexadecyl-rac-glycero-3-H-phosphonate (Manoharan et al., Tetrahedron Lett., 1995, 36:3651; Shea et al., Nucl. Acids Res., 1990, 18:3777), a polyamine or a polyethylene glycol chain (Manoharan et al., Nucleosides & Nucleotides, 1995, 14:969), or adamantane acetic acid (Manoharan et al., Tetrahedron Lett., 1995, 36:3651), a palmityl moiety (Mishra et al., Biochim. Biophys. Acta, 1995, 1264:229), or an octadecylamine or hexylamino-carbonyl-oxycholesterol moiety (Crooke et al., J. Pharmacol. Exp. Ther., 1996, 277:923). Representative United States patents that teach the preparation of such RNA conjugates have been listed above. Typical conjugation protocols involve the synthesis of RNAs bearing an aminolinker at one or more positions of the sequence. The amino group is then reacted with the molecule being conjugated using appropriate coupling or activating reagents. The conjugation reaction can be performed either with the RNA still bound to the solid support or following cleavage of the RNA, in solution phase. Purification of the RNA conjugate by HPLC typically affords the pure conjugate.

### IV. Delivery of an iRNA of the Invention

[0384] The delivery of an iRNA of the invention to a cell e.g., a cell within a subject, such as a human subject (e.g., a subject in need thereof, such as a subject having a disease, disorder, or condition associated with KHK gene expression) can be achieved in a number of different ways. For example, delivery may be performed by contacting a cell with an iRNA of the invention either in vitro or in vivo. In vivo delivery may also be performed directly by administering a composition comprising an iRNA, e.g., a dsRNA, to a subject. Alternatively, in vivo delivery may be performed indirectly by administering one or more vectors that encode and direct the expression of the iRNA. These alternatives are discussed further below.

[0385] In general, any method of delivering a nucleic acid molecule (in vitro or in vivo) can be adapted for use with an iRNA of the invention (see e.g., Akhtar S. and Julian R L. (1992) Trends Cell. Biol. 2(5):139-144 and WO94/02595, which are incorporated herein by reference in their entireties). For in vivo delivery, factors to consider in order to deliver an iRNA molecule include, for example, biological stability of the delivered molecule, prevention of non-specific effects, and accumulation of the delivered molecule in the target tissue. The non-specific effects of an iRNA can be minimized by local administration, for example, by direct injection or implantation into a tissue or topically administering the preparation. Local administration to a treatment site maximizes local concentration of the agent, limits the exposure of the agent to systemic tissues that can otherwise be harmed by the agent or that can degrade the agent, and permits a lower total dose of the iRNA molecule to be administered. Several studies have shown successful knockdown of gene products when a dsRNAi agent is administered locally. For example, intraocular delivery of a VEGF dsRNA by intravitreal injection in cynomolgus monkeys (Tolentino, M J, et al (2004) Retina 24:132-138) and subretinal injections in mice (Reich, S J., et al (2003) Mol. Vis. 9:210-216) were both shown to prevent neovascularization in an experimental model of age-related macular degeneration. In addition, direct intratumoral injection of a dsRNA in mice reduces tumor volume (Pille, J., et al (2005) Mol. Ther.11:267-274) and can prolong survival of tumor-bearing mice (Kim, W J., et al (2006) Mol. Ther. 14:343-350; Li, S., et al (2007) Mol. Ther. 15:515-523). RNA interference has also shown success with local delivery to the CNS by direct injection (Dorn, G., et al. (2004) Nucleic Acids 32:e49; Tan, P H., et al (2005) Gene Ther. 12:59-66; Makimura, H., et al (2002) BMC Neurosci. 3:18; Shishkina, G T., et al (2004) Neuroscience 129:521-528; Thakker, E R., et al (2004) Proc. Natl. Acad. Sci. U.S.A. 101:17270-17275; Akaneya, Y., et al (2005) J. Neurophysiol. 93:594-602) and to the lungs by intranasal administration (Howard, K A., et al (2006) Mol. Ther. 14:476-484; Zhang, X., et al (2004) J. Biol. Chem. 279:10677-10684; Bitko, V., et al (2005) Nat. Med. 11:50-55). For administering an iRNA systemically for the treatment of a disease, the RNA can be modified or alternatively delivered using a drug delivery system; both methods act to prevent the rapid degradation of the dsRNA by endo- and exo-nucleases in vivo. Modification of the RNA or the pharmaceutical carrier can also permit targeting of the iRNA to the target tissue and avoid undesirable off-target effects. iRNA molecules can be modified by chemical conjugation to lipophilic groups such as cholesterol to enhance cellular uptake and prevent degradation. For example, an iRNA directed against ApoB conjugated to a lipophilic cholesterol moiety was injected systemically into mice and resulted in knockdown of apoB mRNA in both the liver and jejunum (Soutschek, J., et al (2004) Nature 432:173-178). Conjugation of an iRNA to an aptamer has been shown to inhibit tumor growth and mediate tumor regression in a mouse model of prostate cancer (McNamara, J O, et al (2006) Nat. Biotechnol. 24:1005-1015). In an alternative embodiment, the iRNA can be delivered using drug delivery systems such as a nanoparticle, a dendrimer, a polymer, liposomes, or a cationic delivery system. Positively charged cationic delivery systems facilitate binding of an iRNA molecule (negatively charged) and also enhance interactions at the negatively charged cell membrane to permit efficient uptake of an iRNA by the cell. Cationic lipids, dendrimers, or polymers can either be bound to an iRNA, or induced to form a vesicle or micelle (see e.g., Kim S H, et al (2008) Journal of Controlled Release 129(2):107-116) that encases an iRNA. The formation of vesicles or micelles further prevents degradation of the iRNA when administered systemically. Methods for making and administering cationic-iRNA complexes are well within the abilities of one skilled in the art (see e.g., Sorensen, D R, et al (2003) J. Mol. Biol 327:761-766; Verma, U N, et al (2003) Clin. Cancer Res. 9:1291-1300; Arnold, A S et al (2007) J. Hypertens. 25:197-205, which are incorporated herein by reference in their entirety). Some non-limiting examples of drug delivery systems useful for systemic delivery of iRNAs include DOTAP (Sorensen, D R., et al (2003), supra; Verma, U N, et al (2003), supra), Oligofectamine, “solid nucleic acid lipid particles” (Zimmermann, T S, et al (2006) Nature 441:111-114), cardiolipin (Chien, P Y, et al (2005) Cancer Gene Ther. 12:321-328; Pal, A, et al (2005) Int J. Oncol. 26:1087-1091), polyethyleneimine (Bonnet M E, et al (2008) Pharm. Res. August 16 Epub ahead of print; Aigner, A. (2006) J. Biomed. Biotechnol. 71659), Arg-Gly-Asp (RGD) peptides (Liu, S. (2006) Mol. Pharm. 3:472-487), and polyamidoamines (Tomalia, D A, et al (2007) Biochem. Soc. Trans. 35:61-67; Yoo, H., et al (1999) Pharm. Res. 16:1799-1804). In some embodiments, an iRNA forms a complex with cyclodextrin for systemic administration. Methods for administration and pharmaceutical compositions of iRNAs and cyclodextrins can be found in U.S. Pat. No. 7,427,605, which is herein incorporated by reference in its entirety.

[0386] A. Vector Encoded iRNAs of the Invention

[0387] iRNA targeting the KHK gene can be expressed from transcription units inserted into DNA or RNA vectors (see, e.g., Couture, A, et al., TIG. (1996), 12:5-10; Skillern, A, et al., International PCT Publication No. WO 00/22113, Conrad, International PCT Publication No. WO 00/22114, and Conrad, U.S. Pat. No. 6,054,299). Expression can be transient (on the order of hours to weeks) or sustained (weeks to months or longer), depending upon the specific construct used and the target tissue or cell type. These transgenes can be introduced as a linear construct, a circular plasmid, or a viral vector, which can be an integrating or non-integrating vector. The transgene can also be constructed to permit it to be inherited as an extrachromosomal plasmid (Gassmann, et al., Proc. Natl. Acad. Sci. USA (1995) 92:1292).

[0388] The individual strand or strands of an iRNA can be transcribed from a promoter on an expression vector. Where two separate strands are to be expressed to generate, for example, a dsRNA, two separate expression vectors can be co-introduced (e.g., by transfection or infection) into a target cell. Alternatively each individual strand of a dsRNA can be transcribed by promoters both of which are located on the same expression plasmid. In one embodiment, a dsRNA is expressed as inverted repeat polynucleotides joined by a linker polynucleotide sequence such that the dsRNA has a stem and loop structure.

[0389] iRNA expression vectors are generally DNA plasmids or viral vectors. Expression vectors compatible with eukaryotic cells, preferably those compatible with vertebrate cells, can be used to produce recombinant constructs for the expression of an iRNA as described herein. Eukaryotic cell expression vectors are well known in the art and are available from a number of commercial sources. Typically, such vectors are provided containing convenient restriction sites for insertion of the desired nucleic acid segment. Delivery of iRNA expressing vectors can be systemic, such as by intravenous or intramuscular administration, by administration to target cells ex-planted from the patient followed by reintroduction into the patient, or by any other means that allows for introduction into a desired target cell.

[0390] Viral vector systems which can be utilized with the methods and compositions described herein include, but are not limited to, (a) adenovirus vectors; (b) retrovirus vectors, including but not limited to lentiviral vectors, moloney murine leukemia virus, etc.; (c) adeno-associated virus vectors; (d) herpes simplex virus vectors; (e) SV 40 vectors; (f) polyoma virus vectors; (g) papilloma virus vectors; (h) picornavirus vectors; (i) pox virus vectors such as an orthopox, e.g., vaccinia virus vectors or avipox, e.g. canary pox or fowl pox; and (j) a helper-dependent or gutless adenovirus. Replication-defective viruses can also be advantageous. Different vectors will or will not become incorporated into the cells' genome. The constructs can include viral sequences for transfection, if desired. Alternatively, the construct can be incorporated into vectors capable of episomal replication, e.g. EPV and EBV vectors. Constructs for the recombinant expression of an iRNA will generally require regulatory elements, e.g., promoters, enhancers, etc., to ensure the expression of the iRNA in target cells. Other aspects to consider for vectors and constructs are known in the art.

### V. Pharmaceutical Compositions of the Invention

[0391] The present invention also includes pharmaceutical compositions and formulations which include the iRNAs of the invention. In one embodiment, provided herein are pharmaceutical compositions containing an iRNA, as described herein, and a pharmaceutically acceptable carrier. The pharmaceutical compositions containing the iRNA are useful for treating a disease or disorder associated with the expression or activity of a KHK gene. Such pharmaceutical compositions are formulated based on the mode of delivery. One example is compositions that are formulated for systemic administration via parenteral delivery, e.g., by subcutaneous (SC) or intravenous (IV) delivery. The pharmaceutical compositions of the invention may be administered in dosages sufficient to inhibit expression of a KHK gene.

[0392] The pharmaceutical compositions of the invention may be administered in dosages sufficient to inhibit expression of a KHK gene. In general, a suitable dose of an iRNA of the invention will be in the range of about 0.001 to about 200.0 milligrams per kilogram body weight of the recipient per day, generally in the range of about 1 to 50 mg per kilogram body weight per day. Typically, a suitable dose of an iRNA of the invention will be in the range of about 0.1 mg/kg to about 5.0 mg/kg, preferably about 0.3 mg/kg and about 3.0 mg/kg. A repeat-dose regimine may include administration of a therapeutic amount of iRNA on a regular basis, such as every other day or once a year. In certain embodiments, the iRNA is administered about once per month to about once per quarter (i.e., about once every three months).

[0393] After an initial treatment regimen, the treatments can be administered on a less frequent basis. For example, after administration weekly or biweekly for three months, administration can be repeated once per month, for six months, or a year; or longer.

[0394] The pharmaceutical composition can be administered once daily, or the iRNA can be administered as two, three, or more sub-doses at appropriate intervals throughout the day or even using continuous infusion or delivery through a controlled release formulation. In that case, the iRNA contained in each sub-dose must be correspondingly smaller in order to achieve the total daily dosage. The dosage unit can also be compounded for delivery over several days, e.g., using a conventional sustained release formulation which provides sustained release of the iRNA over a several day period. Sustained release formulations are well known in the art and are particularly useful for delivery of agents at a particular site, such as could be used with the agents of the present invention. In this embodiment, the dosage unit contains a corresponding multiple of the daily dose.

[0395] In other embodiments, a single dose of the pharmaceutical compositions can be long lasting, such that subsequent doses are administered at not more than 3, 4, or 5 day intervals, or at not more than 1, 2, 3, or 4 week intervals. In some embodiments of the invention, a single dose of the pharmaceutical compositions of the invention is administered once per week. In other embodiments of the invention, a single dose of the pharmaceutical compositions of the invention is administered bi-monthly.

[0396] The skilled artisan will appreciate that certain factors can influence the dosage and timing required to effectively treat a subject, including but not limited to the severity of the disease or disorder, previous treatments, the general health or age of the subject, and other diseases present. Moreover, treatment of a subject with a therapeutically effective amount of a composition can include a single treatment or a series of treatments. Estimates of effective dosages and in vivo half-lives for the individual iRNAs encompassed by the invention can be made using conventional methodologies or on the basis of in vivo testing using an appropriate animal model, as known in the art. Appropriate animal models for various diseases and conditions are provided herein.

[0397] The pharmaceutical compositions of the present invention can be administered in a number of ways depending upon whether local or systemic treatment is desired and upon the area to be treated. Administration can be topical (e.g., by a transdermal patch), pulmonary, e.g., by inhalation or insufflation of powders or aerosols, including by nebulizer; intratracheal, intranasal, epidermal and transdermal, oral or parenteral. Parenteral administration includes intravenous, intraarterial, subcutaneous, intraperitoneal, or intramuscular injection or infusion; subdermal, e.g., via an implanted device; or intracranial, e.g., by intraparenchymal, intrathecal or intraventricular administration.

[0398] The iRNA can be delivered in a manner to target a particular tissue (e.g., vascular endothelial cells).

[0399] Pharmaceutical compositions and formulations for topical or transdermal administration can include transdermal patches, ointments, lotions, creams, gels, drops, suppositories, sprays, liquids and powders. Conventional pharmaceutical carriers, aqueous, powder or oily bases, thickeners and the like can be necessary or desirable. Coated condoms, gloves and the like can also be useful. Suitable topical formulations include those in which the iRNAs featured in the invention are in admixture with a topical delivery agent such as lipids, liposomes, fatty acids, fatty acid esters, steroids, chelating agents and surfactants. Suitable lipids and liposomes include neutral (e.g., dioleoylphosphatidyl DOPE ethanolamine, dimyristoylphosphatidyl choline DMPC, distearolyphosphatidyl choline) negative (e.g., dimyristoylphosphatidyl glycerol DMPG) and cationic (e.g., dioleoyltetramethylaminopropyl DOTAP and dioleoylphosphatidyl ethanolamine DOTMA). iRNAs featured in the invention can be encapsulated within liposomes or can form complexes thereto, in particular to cationic liposomes. Alternatively, iRNAs can be complexed to lipids, in particular to cationic lipids. Suitable fatty acids and esters include but are not limited to arachidonic acid, oleic acid, eicosanoic acid, lauric acid, caprylic acid, capric acid, myristic acid, palmitic acid, stearic acid, linoleic acid, linolenic acid, dicaprate, tricaprate, monoolein, dilaurin, glyceryl 1-monocaprate, 1-dodecylazacycloheptan-2-one, an acylcarnitine, an acylcholine, or a C₁₋₂₀ alkyl ester (e.g., isopropylmyristate IPM), monoglyceride, diglyceride or pharmaceutically acceptable salt thereof). Topical formulations are described in detail in U.S. Pat. No. 6,747,014, which is incorporated herein by reference.

[0400] A. iRNA Formulations Comprising Membranous Molecular Assemblies

[0401] An iRNA for use in the compositions and methods of the invention can be formulated for delivery in a membranous molecular assembly, e.g., a liposome or a micelle. As used herein, the term “liposome” refers to a vesicle composed of amphiphilic lipids arranged in at least one bilayer, e.g., one bilayer or a plurality of bilayers. Liposomes include unilamellar and multilamellar vesicles that have a membrane formed from a lipophilic material and an aqueous interior. The aqueous portion contains the iRNA. The lipophilic material isolates the aqueous interior from an aqueous exterior, which typically does not include the iRNA composition, although in some examples, it may. Liposomes are useful for the transfer and delivery of active ingredients to the site of action. Because the liposomal membrane is structurally similar to biological membranes, when liposomes are applied to a tissue, the liposomal bilayer fuses with bilayer of the cellular membranes. As the merging of the liposome and cell progresses, the internal aqueous contents that include the iRNA are delivered into the cell where the iRNA can specifically bind to a target RNA and can mediate RNA interference. In some cases the liposomes are also specifically targeted, e.g., to direct the iRNA to particular cell types.

[0402] A liposome containing an iRNA agent can be prepared by a variety of methods. In one example, the lipid component of a liposome is dissolved in a detergent so that micelles are formed with the lipid component. For example, the lipid component can be an amphipathic cationic lipid or lipid conjugate. The detergent can have a high critical micelle concentration and may be nonionic. Exemplary detergents include cholate, CHAPS, octylglucoside, deoxycholate, and lauroyl sarcosine. The iRNA agent preparation is then added to the micelles that include the lipid component. The cationic groups on the lipid interact with the iRNA agent and condense around the iRNA agent to form a liposome. After condensation, the detergent is removed, e.g., by dialysis, to yield a liposomal preparation of iRNA agent.

[0403] If necessary a carrier compound that assists in condensation can be added during the condensation reaction, e.g., by controlled addition. For example, the carrier compound can be a polymer other than a nucleic acid (e.g., spermine or spermidine). pH can also adjusted to favor condensation.

[0404] Methods for producing stable polynucleotide delivery vehicles, which incorporate a polynucleotide/cationic lipid complex as structural components of the delivery vehicle, are further described in, e.g., WO 96/37194, the entire contents of which are incorporated herein by reference. Liposome formation can also include one or more aspects of exemplary methods described in Felgner, P. L. et al., Proc. Natl. Acad. Sci., USA 8:7413-7417, 1987; U.S. Pat. No. 4,897,355; 5,171,678; Bangham, et al. M. Mol. Biol. 23:238, 1965; Olson, et al. Biochim. Biophys. Acta 557:9, 1979; Szoka, et al. Proc. Natl. Acad. Sci. 75: 4194, 1978; Mayhew, et al. Biochim. Biophys. Acta 775:169, 1984; Kim, et al. Biochim. Biophys. Acta 728:339, 1983; and Fukunaga, et al. Endocrinol. 115:757, 1984. Commonly used techniques for preparing lipid aggregates of appropriate size for use as delivery vehicles include sonication and freeze-thaw plus extrusion (see, e.g., Mayer, et al. Biochim. Biophys. Acta 858:161, 1986). Microfluidization can be used when consistently small (50 to 200 nm) and relatively uniform aggregates are desired (Mayhew, et al. Biochim. Biophys. Acta 775:169, 1984). These methods are readily adapted to packaging iRNA agent preparations into liposomes.

[0405] Liposomes fall into two broad classes. Cationic liposomes are positively charged liposomes which interact with the negatively charged nucleic acid molecules to form a stable complex. The positively charged nucleic acid/liposome complex binds to the negatively charged cell surface and is internalized in an endosome. Due to the acidic pH within the endosome, the liposomes are ruptured, releasing their contents into the cell cytoplasm (Wang et al., Biochem. Biophys. Res. Commun., 1987, 147, 980-985).

[0406] Liposomes which are pH-sensitive or negatively-charged, entrap nucleic acids rather than complex with it. Since both the nucleic acid and the lipid are similarly charged, repulsion rather than complex formation occurs. Nevertheless, some nucleic acid is entrapped within the aqueous interior of these liposomes. pH-sensitive liposomes have been used to deliver nucleic acids encoding the thymidine kinase gene to cell monolayers in culture. Expression of the exogenous gene was detected in the target cells (Zhou et al., Journal of Controlled Release, 1992, 19, 269-274).

[0407] One major type of liposomal composition includes phospholipids other than naturally-derived phosphatidylcholine. Neutral liposome compositions, for example, can be formed from dimyristoyl phosphatidylcholine (DMPC) or dipalmitoyl phosphatidylcholine (DPPC). Anionic liposome compositions generally are formed from dimyristoyl phosphatidylglycerol, while anionic fusogenic liposomes are formed primarily from dioleoyl phosphatidylethanolamine (DOPE). Another type of liposomal composition is formed from phosphatidylcholine (PC) such as, for example, soybean PC, and egg PC. Another type is formed from mixtures of two or more of phospholipid, phosphatidylcholine, and cholesterol.

[0408] Examples of other methods to introduce liposomes into cells in vitro and in vivo include U.S. Pat. Nos. 5,283,185 and 5,171,678; WO 94/00569; WO 93/24640; WO 91/16024; Felgner, J. Biol. Chem. 269:2550, 1994; Nabel, Proc. Natl. Acad. Sci. 90:11307, 1993; Nabel, Human Gene Ther. 3:649, 1992; Gershon, Biochem. 32:7143, 1993; and Strauss EMBO J. 11:417, 1992.

[0409] Non-ionic liposomal systems have also been examined to determine their utility in the delivery of drugs to the skin, in particular systems comprising non-ionic surfactant and cholesterol. Non-ionic liposomal formulations comprising Novasome™ I (glyceryl dilaurate/cholesterol/polyoxyethylene-10-stearyl ether) and Novasome™ II (glyceryl distearate/cholesterol/polyoxyethylene-10-stearyl ether) were used to deliver cyclosporin-A into the dermis of mouse skin. Results indicated that such non-ionic liposomal systems were effective in facilitating the deposition of cyclosporine A into different layers of the skin (Hu et al. S.T.P.Pharma. Sci., 1994, 4(6) 466).

[0410] Liposomes also include “sterically stabilized” liposomes, a term which, as used herein, refers to liposomes comprising one or more specialized lipids that, when incorporated into liposomes, result in enhanced circulation lifetimes relative to liposomes lacking such specialized lipids. Examples of sterically stabilized liposomes are those in which part of the vesicle-forming lipid portion of the liposome (A) comprises one or more glycolipids, such as monosialoganglioside G_{M1}, or (B) is derivatized with one or more hydrophilic polymers, such as a polyethylene glycol (PEG) moiety. While not wishing to be bound by any particular theory, it is thought in the art that, at least for sterically stabilized liposomes containing gangliosides, sphingomyelin, or PEG-derivatized lipids, the enhanced circulation half-life of these sterically stabilized liposomes derives from a reduced uptake into cells of the reticuloendothelial system (RES) (Allen et al., FEBS Letters, 1987, 223, 42; Wu et al., Cancer Research, 1993, 53, 3765).

[0411] Various liposomes comprising one or more glycolipids are known in the art. Papahadjopoulos et al. (Ann. N.Y. Acad. Sci., 1987, 507, 64) reported the ability of monosialoganglioside G_{M1}, galactocerebroside sulfate and phosphatidylinositol to improve blood half-lives of liposomes. These findings were expounded upon by Gabizon et al. (Proc. Natl. Acad. Sci. U.S.A., 1988, 85, 6949). U.S. Pat. No. 4,837,028 and WO 88/04924, both to Allen et al., disclose liposomes comprising (1) sphingomyelin and (2) the ganglioside G_{M1} or a galactocerebroside sulfate ester. U.S. Pat. No. 5,543,152 (Webb et al.) discloses liposomes comprising sphingomyelin. Liposomes comprising 1,2-sn-dimyristoylphosphatidylcholine are disclosed in WO 97/13499 (Lim et al).

[0412] In some embodiments, cationic liposomes are used. Cationic liposomes possess the advantage of being able to fuse to the cell membrane. Non-cationic liposomes, although not able to fuse as efficiently with the plasma membrane, are taken up by macrophages in vivo and can be used to deliver iRNA agents to macrophages.

[0413] Further advantages of liposomes include: liposomes obtained from natural phospholipids are biocompatible and biodegradable; liposomes can incorporate a wide range of water and lipid soluble drugs; liposomes can protect encapsulated iRNAs in their internal compartments from metabolism and degradation (Rosoff, in “Pharmaceutical Dosage Forms,” Lieberman, Rieger and Banker (Eds.), 1988, volume 1, p. 245). Important considerations in the preparation of liposome formulations are the lipid surface charge, vesicle size, and the aqueous volume of the liposomes.

[0414] A positively charged synthetic cationic lipid, N-[1-(2,3-dioleyloxy)propyl]-N,N,N-trimethylammonium chloride (DOTMA) can be used to form small liposomes that interact spontaneously with nucleic acid to form lipid-nucleic acid complexes which are capable of fusing with the negatively charged lipids of the cell membranes of tissue culture cells, resulting in delivery of iRNA agent (see, e.g., Felgner, P. L. et al., Proc. Natl. Acad. Sci., USA 8:7413-7417, 1987 and U.S. Pat. No. 4,897,355 for a description of DOTMA and its use with DNA).

[0415] A DOTMA analogue, 1,2-bis(oleoyloxy)-3-(trimethylammonia)propane (DOTAP) can be used in combination with a phospholipid to form DNA-complexing vesicles. Lipofectin™ (Bethesda Research Laboratories, Gaithersburg, Md.) is an effective agent for the delivery of highly anionic nucleic acids into living tissue culture cells that comprise positively charged DOTMA liposomes which interact spontaneously with negatively charged polynucleotides to form complexes. When enough positively charged liposomes are used, the net charge on the resulting complexes is also positive. Positively charged complexes prepared in this way spontaneously attach to negatively charged cell surfaces, fuse with the plasma membrane, and efficiently deliver functional nucleic acids into, for example, tissue culture cells. Another commercially available cationic lipid, 1,2-bis(oleoyloxy)-3,3-(trimethylammonia)propane (“DOTAP”) (Boehringer Mannheim, Indianapolis, Indiana) differs from DOTMA in that the oleoyl moieties are linked by ester, rather than ether linkages.

[0416] Other reported cationic lipid compounds include those that have been conjugated to a variety of moieties including, for example, carboxyspermine which has been conjugated to one of two types of lipids and includes compounds such as 5-carboxyspermylglycine dioctaoleoylamide (“DOGS”) (Transfectam™, Promega, Madison, Wisconsin) and dipalmitoylphosphatidylethanolamine 5-carboxyspermyl-amide (“DPPES”) (see, e.g., U.S. Pat. No. 5,171,678).

[0417] Another cationic lipid conjugate includes derivatization of the lipid with cholesterol (“DC-Chol”) which has been formulated into liposomes in combination with DOPE (See, Gao, X. and Huang, L., Biochim. Biophys. Res. Commun. 179:280, 1991). Lipopolylysine, made by conjugating polylysine to DOPE, has been reported to be effective for transfection in the presence of serum (Zhou, X. et al., Biochim. Biophys. Acta 1065:8, 1991). For certain cell lines, these liposomes containing conjugated cationic lipids, are said to exhibit lower toxicity and provide more efficient transfection than the DOTMA-containing compositions. Other commercially available cationic lipid products include DMRIE and DMRIE-HP (Vical, La Jolla, California) and Lipofectamine (DOSPA) (Life Technology, Inc., Gaithersburg, Maryland). Other cationic lipids suitable for the delivery of oligonucleotides are described in WO 98/39359 and WO 96/37194.

[0418] Liposomal formulations are particularly suited for topical administration, liposomes present several advantages over other formulations. Such advantages include reduced side effects related to high systemic absorption of the administered drug, increased accumulation of the administered drug at the desired target, and the ability to administer iRNA agent into the skin. In some implementations, liposomes are used for delivering iRNA agent to epidermal cells and also to enhance the penetration of iRNA agent into dermal tissues, e.g., into skin. For example, the liposomes can be applied topically. Topical delivery of drugs formulated as liposomes to the skin has been documented (see, e.g., Weiner et al., Journal of Drug Targeting, 1992, vol. 2,405-410 and du Plessis et al., Antiviral Research, 18, 1992, 259-265; Mannino, R. J. and Fould-Fogerite, S., Biotechniques 6:682-690, 1988; Itani, T. et al. Gene 56:267-276. 1987; Nicolau, C. et al. Meth. Enz. 149:157-176, 1987; Straubinger, R. M. and Papahadjopoulos, D. Meth. Enz. 101:512-527, 1983; Wang, C. Y. and Huang, L., Proc. Natl. Acad. Sci. USA 84:7851-7855, 1987).

[0419] Non-ionic liposomal systems have also been examined to determine their utility in the delivery of drugs to the skin, in particular systems comprising non-ionic surfactant and cholesterol. Non-ionic liposomal formulations comprising Novasome™ I (glyceryl dilaurate/cholesterol/polyoxyethylene-10-stearyl ether) and Novasome™ II (glyceryl distearate/cholesterol/polyoxyethylene-10-stearyl ether) were used to deliver a drug into the dermis of mouse skin. Such formulations with iRNA agent are useful for treating a dermatological disorder.

[0420] Liposomes that include iRNA can be made highly deformable. Such deformability can enable the liposomes to penetrate through pore that are smaller than the average radius of the liposome. For example, transfersomes are a type of deformable liposomes. Transferosomes can be made by adding surface edge activators, usually surfactants, to a standard liposomal composition. Transfersomes that include iRNAs can be delivered, for example, subcutaneously by infection in order to deliver iRNAs to keratinocytes in the skin. In order to cross intact mammalian skin, lipid vesicles must pass through a series of fine pores, each with a diameter less than 50 nm, under the influence of a suitable transdermal gradient. In addition, due to the lipid properties, these transfersomes can be self-optimizing (adaptive to the shape of pores, e.g., in the skin), self-repairing, and can frequently reach their targets without fragmenting, and often self-loading.

[0421] Other formulations amenable to the present invention are described in WO/2008/042973.

[0422] Transfersomes are yet another type of liposomes, and are highly deformable lipid aggregates which are attractive candidates for drug delivery vehicles. Transfersomes can be described as lipid droplets which are so highly deformable that they are easily able to penetrate through pores which are smaller than the droplet. Transfersomes are adaptable to the environment in which they are used, e.g., they are self-optimizing (adaptive to the shape of pores in the skin), self-repairing, frequently reach their targets without fragmenting, and often self-loading. To make transfersomes it is possible to add surface edge-activators, usually surfactants, to a standard liposomal composition. Transfersomes have been used to deliver serum albumin to the skin. The transfersomes-mediated delivery of serum albumin has been shown to be as effective as subcutaneous injection of a solution containing serum albumin.

[0423] Surfactants find wide application in formulations such as emulsions (including microemulsions) and liposomes. The most common way of classifying and ranking the properties of the many different types of surfactants, both natural and synthetic, is by the use of the hydrophile/lipophile balance (HLB). The nature of the hydrophilic group (also known as the “head”) provides the most useful means for categorizing the different surfactants used in formulations (Rieger, in “Pharmaceutical Dosage Forms”, Marcel Dekker, Inc., New York, N.Y., 1988, p. 285).

[0424] If the surfactant molecule is not ionized, it is classified as a nonionic surfactant. Nonionic surfactants find wide application in pharmaceutical and cosmetic products and are usable over a wide range of pH values. In general their HLB values range from 2 to about 18 depending on their structure. Nonionic surfactants include nonionic esters such as ethylene glycol esters, propylene glycol esters, glyceryl esters, polyglyceryl esters, sorbitan esters, sucrose esters, and ethoxylated esters. Nonionic alkanolamides and ethers such as fatty alcohol ethoxylates, propoxylated alcohols, and ethoxylated/propoxylated block polymers are also included in this class. The polyoxyethylene surfactants are the most popular members of the nonionic surfactant class.

[0425] If the surfactant molecule carries a negative charge when it is dissolved or dispersed in water, the surfactant is classified as anionic. Anionic surfactants include carboxylates such as soaps, acyl lactylates, acyl amides of amino acids, esters of sulfuric acid such as alkyl sulfates and ethoxylated alkyl sulfates, sulfonates such as alkyl benzene sulfonates, acyl isethionates, acyl taurates and sulfosuccinates, and phosphates. The most important members of the anionic surfactant class are the alkyl sulfates and the soaps.

[0426] If the surfactant molecule carries a positive charge when it is dissolved or dispersed in water, the surfactant is classified as cationic. Cationic surfactants include quaternary ammonium salts and ethoxylated amines. The quaternary ammonium salts are the most used members of this class.

[0427] If the surfactant molecule has the ability to carry either a positive or negative charge, the surfactant is classified as amphoteric. Amphoteric surfactants include acrylic acid derivatives, substituted alkylamides, N-alkylbetaines and phosphatides.

[0428] The use of surfactants in drug products, formulations and in emulsions has been reviewed (Rieger, in “Pharmaceutical Dosage Forms”, Marcel Dekker, Inc., New York, N.Y., 1988, p. 285).

[0429] The iRNA for use in the methods of the invention can also be provided as micellar formulations. “Micelles” are defined herein as a particular type of molecular assembly in which amphipathic molecules are arranged in a spherical structure such that all the hydrophobic portions of the molecules are directed inward, leaving the hydrophilic portions in contact with the surrounding aqueous phase. The converse arrangement exists if the environment is hydrophobic.

[0430] A mixed micellar formulation suitable for delivery through transdermal membranes may be prepared by mixing an aqueous solution of iRNA, an alkali metal C₈ to C₂₂ alkyl sulphate, and a micelle forming compounds. Exemplary micelle forming compounds include lecithin, hyaluronic acid, pharmaceutically acceptable salts of hyaluronic acid, glycolic acid, lactic acid, chamomile extract, cucumber extract, oleic acid, linoleic acid, linolenic acid, monoolein, monooleates, monolaurates, borage oil, evening of primrose oil, menthol, trihydroxy oxo cholanyl glycine and pharmaceutically acceptable salts thereof, glycerin, polyglycerin, lysine, polylysine, triolein, polyoxyethylene ethers and analogues thereof, polidocanol alkyl ethers and analogues thereof, chenodeoxycholate, deoxycholate, and mixtures thereof. The micelle forming compounds may be added at the same time or after addition of the alkali metal alkyl sulphate. Mixed micelles will form with substantially any kind of mixing of the ingredients but vigorous mixing in order to provide smaller size micelles.

[0431] In one method a first micellar composition is prepared which contains the RNAi and at least the alkali metal alkyl sulphate. The first micellar composition is then mixed with at least three micelle forming compounds to form a mixed micellar composition. In another method, the micellar composition is prepared by mixing the RNAi, the alkali metal alkyl sulphate and at least one of the micelle forming compounds, followed by addition of the remaining micelle forming compounds, with vigorous mixing.

[0432] Phenol or m-cresol may be added to the mixed micellar composition to stabilize the formulation and protect against bacterial growth. Alternatively, phenol or m-cresol may be added with the micelle forming ingredients. An isotonic agent such as glycerin may also be added after formation of the mixed micellar composition.

[0433] For delivery of the micellar formulation as a spray, the formulation can be put into an aerosol dispenser and the dispenser is charged with a propellant. The propellant, which is under pressure, is in liquid form in the dispenser. The ratios of the ingredients are adjusted so that the aqueous and propellant phases become one, i.e., there is one phase. If there are two phases, it is necessary to shake the dispenser prior to dispensing a portion of the contents, e.g., through a metered valve. The dispensed dose of pharmaceutical agent is propelled from the metered valve in a fine spray.

[0434] Propellants may include hydrogen-containing chlorofluorocarbons, hydrogen-containing fluorocarbons, dimethyl ether and diethyl ether. In certain embodiments, HFA 134a (1,1,1,2 tetrafluoroethane) may be used.

[0435] The specific concentrations of the essential ingredients can be determined by relatively straightforward experimentation. For absorption through the oral cavities, it is often desirable to increase, e.g., at least double or triple, the dosage for through injection or administration through the gastrointestinal tract.

[0436] B. Lipid Particles

[0437] iRNAs, e.g., dsRNAi agents of in the invention may be fully encapsulated in a lipid formulation, e.g., a LNP, or other nucleic acid-lipid particle.

[0438] As used herein, the term “LNP” refers to a stable nucleic acid-lipid particle. LNPs typically contain a cationic lipid, a non-cationic lipid, and a lipid that prevents aggregation of the particle (e.g., a PEG-lipid conjugate). LNPs are extremely useful for systemic applications, as they exhibit extended circulation lifetimes following intravenous (i.v.) injection and accumulate at distal sites (e.g., sites physically separated from the administration site). LNPs include “pSPLP,” which include an encapsulated condensing agent-nucleic acid complex as set forth in PCT Publication No. WO 00/03683. The particles of the present invention typically have a mean diameter of about 50 nm to about 150 nm, more typically about 60 nm to about 130 nm, more typically about 70 nm to about 110 nm, most typically about 70 nm to about 90 nm, and are substantially nontoxic. In addition, the nucleic acids when present in the nucleic acid-lipid particles of the present invention are resistant in aqueous solution to degradation with a nuclease. Nucleic acid-lipid particles and their method of preparation are disclosed in, e.g., U.S. Pat. Nos. 5,976,567; 5,981,501; 6,534,484; 6,586,410; 6,815,432; US Publication No. 2010/0324120 and PCT Publication No. WO 96/40964.

[0439] In one embodiment, the lipid to drug ratio (mass/mass ratio) (e.g., lipid to dsRNA ratio) will be in the range of from about 1:1 to about 50:1, from about 1:1 to about 25:1, from about 3:1 to about 15:1, from about 4:1 to about 10:1, from about 5:1 to about 9:1, or about 6:1 to about 9:1. Ranges intermediate to the above recited ranges are also contemplated to be part of the invention.

[0440] The cationic lipid can be, for example, N,N-dioleyl-N,N-dimethylammonium chloride (DODAC), N,N-distearyl-N,N-dimethylammonium bromide (DDAB), N-(1-(2,3-dioleoyloxy)propyl)-N,N,N-trimethylammonium chloride (DOTAP), N-(1-(2,3-dioleyloxy)propyl)-N,N,N-trimethylammonium chloride (DOTMA), N,N-dimethyl-2,3-dioleyloxy)propylamine (DODMA), 1,2-DiLinoleyloxy-N,N-dimethylaminopropane (DLinDMA), 1,2-Dilinolenyloxy-N,N-dimethylaminopropane (DLenDMA), 1,2-Dilinoleylcarbamoyloxy-3-dimethylaminopropane (DLin-C-DAP), 1,2-Dilinoleyoxy-3-(dimethylamino)acetoxypropane (DLin-DAC), 1,2-Dilinoleyoxy-3-morpholinopropane (DLin-MA), 1,2-Dilinoleoyl-3-dimethylaminopropane (DLinDAP), 1,2-Dilinoleylthio-3-dimethylaminopropane (DLin-S-DMA), 1-Linoleoyl-2-linoleyloxy-3-dimethylaminopropane (DLin-2-DMAP), 1,2-Dilinoleyloxy-3-trimethylaminopropane chloride salt (DLin-TMA.Cl), 1,2-Dilinoleoyl-3-trimethylaminopropane chloride salt (DLin-TAP.Cl), 1,2-Dilinoleyloxy-3-(N-methylpiperazino)propane (DLin-MPZ), or 3-(N,N-Dilinoleylamino)-1,2-propanediol (DLinAP), 3-(N,N-Dioleylamino)-1,2-propanedio (DOAP), 1,2-Dilinoleyloxo-3-(2-N,N-dimethylamino)ethoxypropane (DLin-EG-DMA), 1,2-Dilinolenyloxy-N,N-dimethylaminopropane (DLinDMA), 2,2-Dilinoleyl-4-dimethylaminomethyl-[1,3]-dioxolane (DLin-K-DMA) or analogs thereof, (3aR,5s,6aS)—N,N-dimethyl-2,2-di((9Z,12Z)-octadeca-9,12-dienyl)tetrahydro-3aH-cyclopenta[d][1,3]dioxol-5-amine (ALN100), (6Z,9Z,28Z,31Z)-heptatriaconta-6,9,28,31-tetraen-19-yl 4-(dimethylamino)butanoate (MC3), 1,1′-(2-(4-(2-((2-(bis(2-hydroxydodecyl)amino)ethyl)(2-hydroxydodecyl)amino)ethyl)piperazin-1-yl)ethylazanediyl)didodecan-2-ol (Tech GI), or a mixture thereof. The cationic lipid can comprise from about 20 mol % to about 50 mol % or about 40 mol % of the total lipid present in the particle.

[0441] In some embodiments, the compound 2,2-Dilinoleyl-4-dimethylaminoethyl-[1,3]-dioxolane can be used to prepare lipid-siRNA nanoparticles.

[0442] In some embodiments, the lipid-siRNA particle includes 40% 2, 2-Dilinoleyl-4-dimethylaminoethyl-[1,3]-dioxolane: 10% DSPC: 40% Cholesterol: 10% PEG-C-DOMG (mole percent) with a particle size of 63.0±20 nm and a 0.027 siRNA/Lipid Ratio.

[0443] The ionizable/non-cationic lipid can be an anionic lipid or a neutral lipid including, but not limited to, distearoylphosphatidylcholine (DSPC), dioleoylphosphatidylcholine (DOPC), dipalmitoylphosphatidylcholine (DPPC), dioleoylphosphatidylglycerol (DOPG), dipalmitoylphosphatidylglycerol (DPPG), dioleoyl-phosphatidylethanolamine (DOPE), palmitoyloleoylphosphatidylcholine (POPC), palmitoyloleoylphosphatidylethanolamine (POPE), dioleoyl-phosphatidylethanolamine 4-(N-maleimidomethyl)-cyclohexane-1-carboxylate (DOPE-mal), dipalmitoyl phosphatidyl ethanolamine (DPPE), dimyristoylphosphoethanolamine (DMPE), distearoyl-phosphatidyl-ethanolamine (DSPE), 16-O-monomethyl PE, 16-O-dimethyl PE, 18-1-trans PE, 1-stearoyl-2-oleoyl-phosphatidyethanolamine (SOPE), cholesterol, or a mixture thereof. The non-cationic lipid can be from about 5 mol % to about 90 mol %, about 10 mol %, or about 58 mol % if cholesterol is included, of the total lipid present in the particle.

[0444] The conjugated lipid that inhibits aggregation of particles can be, for example, a polyethyleneglycol (PEG)-lipid including, without limitation, a PEG-diacylglycerol (DAG), a PEG-dialkyloxypropyl (DAA), a PEG-phospholipid, a PEG-ceramide (Cer), or a mixture thereof. The PEG-DAA conjugate can be, for example, a PEG-dilauryloxypropyl (Ci₂), a PEG-dimyristyloxypropyl (Ci₄), a PEG-dipalmityloxypropyl (Ci₆), or a PEG-distearyloxypropyl (C]₈). The conjugated lipid that prevents aggregation of particles can be from 0 mol % to about 20 mol % or about 2 mol % of the total lipid present in the particle.

[0445] In some embodiments, the nucleic acid-lipid particle further includes cholesterol at, e.g., about 10 mol % to about 60 mol % or about 48 mol % of the total lipid present in the particle.

[0446] In one embodiment, the lipidoid ND98·4HCl (MW 1487) (see U.S. patent application Ser. No. 12/056,230, filed Mar. 26, 2008, which is incorporated herein by reference), Cholesterol (Sigma-Aldrich), and PEG-Ceramide C16 (Avanti Polar Lipids) can be used to prepare lipid-dsRNA nanoparticles (i.e., LNP01 particles). Stock solutions of each in ethanol can be prepared as follows: ND98, 133 mg/ml; Cholesterol, 25 mg/ml, PEG-Ceramide C16, 100 mg/ml. The ND98, Cholesterol, and PEG-Ceramide C16 stock solutions can then be combined in a, e.g., 42:48:10 molar ratio. The combined lipid solution can be mixed with aqueous dsRNA (e.g., in sodium acetate pH 5) such that the final ethanol concentration is about 35-45% and the final sodium acetate concentration is about 100-300 mM. Lipid-dsRNA nanoparticles typically form spontaneously upon mixing. Depending on the desired particle size distribution, the resultant nanoparticle mixture can be extruded through a polycarbonate membrane (e.g., 100 nm cut-off) using, for example, a thermobarrel extruder, such as Lipex Extruder (Northern Lipids, Ic). In some cases, the extrusion step can be omitted. Ethanol removal and simultaneous buffer exchange can be accomplished by, for example, dialysis or tangential flow filtration. Buffer can be exchanged with, for example, phosphate buffered saline (PBS) at about pH 7, e.g., about pH 6.9, about pH 7.0, about pH 7.1, about pH 7.2, about pH 7.3, or about pH 74

[chemical structure]

[0447] LNP01 formulations are described, e.g., in International Application Publication No. WO 2008/042973, which is hereby incorporated by reference.

[0448] Additional exemplary lipid-dsRNA formulations are described in Table 1.

TABLE 1

| | | cationic lipid/non-cationic lipid/ |
|---|---|---|
| | | cholesterol/PEG-lipid conjugate |
| | Ionizable/Cationic Lipid | Lipid:siRNA ratio |
| SNALP-1 | 1,2-Dilinolenyloxy-N,N- | DLinDMA/DPPC/Cholesterol/PEG-cDMA |
| | dimethylaminopropane (DLinDMA) | (57.1/7.1/34.4/1.4) |
| | | lipid:siRNA ~7:1 |
| 2-XTC | 2,2-Dilinoleyl-4-dimethylaminoethyl- | XTC/DPPC/Cholesterol/PEG-cDMA |
| | [1,3]-dioxolane (XTC) | 57.1/7.1/34.4/1.4 |
| | | lipid:siRNA ~7:1 |
| LNP05 | 2,2-Dilinoleyl-4-dimethylaminoethyl- | XTC/DSPC/Cholesterol/PEG-DMG |
| | [1,3]-dioxolane (XTC) | 57.5/7.5/31.5/3.5 |
| | | lipid:siRNA ~6:1 |
| LNP06 | 2,2-Dilinoleyl-4-dimethylaminoethyl- | XTC/DSPC/Cholesterol/PEG-DMG |
| | [1,3]-dioxolane (XTC) | 57.5/7.5/31.5/3.5 |
| | | lipid:siRNA ~11:1 |
| LNP07 | 2,2-Dilinoleyl-4-dimethylaminoethyl- | XTC/DSPC/Cholesterol/PEG-DMG |
| | [1,3]-dioxolane (XTC) | 60/7.5/31/1.5, |
| | | lipid:siRNA ~6:1 |
| LNP08 | 2,2-Dilinoleyl-4-dimethylaminoethyl- | XTC/DSPC/Cholesterol/PEG-DMG |
| | [1,3]-dioxolane (XTC) | 60/7.5/31/1.5, |
| | | lipid:siRNA ~11:1 |
| LNP09 | 2,2-Dilinoleyl-4-dimethylaminoethyl- | XTC/DSPC/Cholesterol/PEG-DMG |
| | [1,3]-dioxolane (XTC) | 50/10/38.5/1.5 |
| | | Lipid:siRNA 10:1 |
| LNP10 | (3aR,5s,6aS)-N,N-dimethyl-2,2- | ALN100/DSPC/Cholesterol/PEG-DMG |
| | di((9Z,12Z)-octadeca-9,12- | 50/10/38.5/1.5 |
| | dienyl)tetrahydro-3aH- | Lipid:siRNA 10:1 |
| | cyclopenta[d][1,3]dioxol-5-amine | |
| | (ALN100) | |
| LNP11 | (6Z,9Z,28Z,31Z)-heptatriaconta- | MC-3/DSPC/Cholesterol/PEG-DMG |
| | 6,9,28,31-tetraen-19-yl 4- | 50/10/38.5/1.5 |
| | (dimethylamino)butanoate (MC3) | Lipid:siRNA 10:1 |
| LNP12 | 1,1′-(2-(4-(2-((2-(bis(2- | Tech G1/DSPC/Cholesterol/PEG-DMG |
| | hydroxydodecyl)amino)ethyl)(2- | 50/10/38.5/1.5 |
| | hydroxydodecyl)amino)ethyl)piperazin- | Lipid:siRNA 10:1 |
| | 1-yl)ethylazanediyl)didodecan-2-ol | |
| | (Tech G1) | |
| LNP13 | XTC | XTC/DSPC/Chol/PEG-DMG |
| | | 50/10/38.5/1.5 |
| | | Lipid:siRNA: 33:1 |
| LNP14 | MC3 | MC3/DSPC/Chol/PEG-DMG |
| | | 40/15/40/5 |
| | | Lipid:siRNA: 11:1 |
| LNP15 | MC3 | MC3/DSPC/Chol/PEG-DSG/GalNAc-PEG-DSG |
| | | 50/10/35/4.5/0.5 |
| | | Lipid:siRNA: 11:1 |
| LNP16 | MC3 | MC3/DSPC/Chol/PEG-DMG |
| | | 50/10/38.5/1.5 |
| | | Lipid:siRNA: 7:1 |
| LNP17 | MC3 | MC3/DSPC7Chol/PEG-DSG |
| | | 50/10/38.5/1.5 |
| | | Lipid:siRNA: 10:1 |
| LNP18 | MC3 | MC3/DSPC/Chol/PEG-DMG |
| | | 50/10/38.5/1.5 |
| | | Lipid:siRNA: 12:1 |
| LNP19 | MC3 | MC3/DSPC/Chol/PEG-DMG |
| | | 50/10/35/5 |
| | | Lipid:siRNA: 8:1 |
| LNP20 | MC3 | MC3/DSPC7Chol/PEG-DPG |
| | | 50/10/38.5/1.5 |
| | | Lipid:siRNA: 10:1 |
| LNP21 | C12-200 | C12-200/DSPC/Chol/PEG-DSG |
| | | 50/10/38.5/1.5 |
| | | Lipid:siRNA: 7:1 |
| LNP22 | XTC | XTC/DSPC/Chol/PEG-DSG |
| | | 50/10/38.5/1.5 |
| | | Lipid:siRNA: 10:1 |

DSPC: distearoylphosphatidylcholine
DPPC: dipalmitoylphosphatidylcholine
PEG-DMG: PEG-didimyristoyl glycerol (C14-PEG, or PEG-C14) (PEG with avg mol wt of 2000)
PEG-DSG: PEG-distyryl glycerol (C18-PEG, or PEG-C18) (PEG with avg mol wt of 2000)
PEG-cDMA: PEG-carbamoyl-1,2-dimyristyloxypropylamine (PEG with avg mol wt of 2000)
SNALP (1,2-Dilinolenyloxy-N,N-dimethylaminopropane (DLinDMA)) comprising formulations are described in International Publication No. WO2009/127060, filed Apr. 15, 2009, which is hereby incorporated by reference.
XTC comprising formulations are described, e.g., in International Application No. PCT/US2010/022614, filed Jan. 29, 2010, which is hereby incorporated by reference.
MC3 comprising formulations are described, e.g., in US Patent Publication No. 2010/0324120, filed Jun. 10, 2010, the entire contents of which are hereby incorporated by reference.
ALNY-100 comprising formulations are described, e.g., International patent application number PCT/US09/63933, filed on Nov. 10, 2009, which is hereby incorporated by reference.
C12-200 comprising formulations are described in WO2010/129709, which is hereby incorporated by reference.

[0449] Compositions and formulations for oral administration include powders or granules, microparticulates, nanoparticulates, suspensions or solutions in water or non-aqueous media, capsules, gel capsules, sachets, tablets or minitablets. Thickeners, flavoring agents, diluents, emulsifiers, dispersing aids, or binders can be desirable. In some embodiments, oral formulations are those in which dsRNAs featured in the invention are administered in conjunction with one or more penetration enhancer surfactants and chelators. Suitable surfactants include fatty acids or esters or salts thereof, bile acids or salts thereof. Suitable bile acids/salts include chenodeoxycholic acid (CDCA) and ursodeoxychenodeoxycholic acid (UDCA), cholic acid, dehydrocholic acid, deoxycholic acid, glucholic acid, glycholic acid, glycodeoxycholic acid, taurocholic acid, taurodeoxycholic acid, sodium tauro-24,25-dihydro-fusidate and sodium glycodihydrofusidate. Suitable fatty acids include arachidonic acid, undecanoic acid, oleic acid, lauric acid, caprylic acid, capric acid, myristic acid, palmitic acid, stearic acid, linoleic acid, linolenic acid, dicaprate, tricaprate, monoolein, dilaurin, glyceryl 1-monocaprate, 1-dodecylazacycloheptan-2-one, an acylcarnitine, an acylcholine, or a monoglyceride, a diglyceride or a pharmaceutically acceptable salt thereof (e.g., sodium). In some embodiments, combinations of penetration enhancers are used, for example, fatty acids/salts in combination with bile acids/salts. One exemplary combination is the sodium salt of lauric acid, capric acid and UDCA. Further penetration enhancers include polyoxyethylene-9-lauryl ether, polyoxyethylene-20-cetyl ether. DsRNAs featured in the invention can be delivered orally, in granular form including sprayed dried particles, or complexed to form micro or nanoparticles. DsRNA complexing agents include poly-amino acids; polyimines; polyacrylates; polyalkylacrylates, polyoxethanes, polyalkylcyanoacrylates; cationized gelatins, albumins, starches, acrylates, polyethyleneglycols (PEG), and starches; polyalkylcyanoacrylates; DEAE-derivatized polyimines, pollulans, celluloses, and starches. Suitable complexing agents include chitosan, N-trimethylchitosan, poly-L-lysine, polyhistidine, polyornithine, polyspermines, protamine, polyvinylpyridine, polythiodiethylaminomethylethylene P(TDAE), polyaminostyrene (e.g., p-amino), poly(methylcyanoacrylate), poly(ethylcyanoacrylate), poly(butylcyanoacrylate), poly(isobutylcyanoacrylate), poly(isohexylcynaoacrylate), DEAE-methacrylate, DEAE-hexylacrylate, DEAE-acrylamide, DEAE-albumin and DEAE-dextran, polymethylacrylate, polyhexylacrylate, poly(D,L-lactic acid), poly(DL-lactic-co-glycolic acid (PLGA), alginate, and polyethyleneglycol (PEG). Oral formulations for dsRNAs and their preparation are described in detail in U.S. Pat. No. 6,887,906, US Publn. No. 20030027780, and U.S. Pat. No. 6,747,014, each of which is incorporated herein by reference.

[0450] Compositions and formulations for parenteral, intraparenchymal (into the brain), intrathecal, intraventricular or intrahepatic administration can include sterile aqueous solutions which can also contain buffers, diluents, and other suitable additives such as, but not limited to, penetration enhancers, carrier compounds, and other pharmaceutically acceptable carriers or excipients.

[0451] Pharmaceutical compositions of the present invention include, but are not limited to, solutions, emulsions, and liposome-containing formulations. These compositions can be generated from a variety of components that include, but are not limited to, preformed liquids, self-emulsifying solids, and self-emulsifying semisolids. Formulations include those that target the liver when treating hepatic disorders such as hepatic carcinoma.

[0452] The pharmaceutical formulations of the present invention, which can conveniently be presented in unit dosage form, can be prepared according to conventional techniques well known in the pharmaceutical industry. Such techniques include the step of bringing into association the active ingredients with the pharmaceutical carrier(s) or excipient(s). In general, the formulations are prepared by uniformly and intimately bringing into association the active ingredients with liquid carriers or finely divided solid carriers or both, and then, if necessary, shaping the product.

[0453] The compositions of the present invention can be formulated into any of many possible dosage forms such as, but not limited to, tablets, capsules, gel capsules, liquid syrups, soft gels, suppositories, and enemas. The compositions of the present invention can also be formulated as suspensions in aqueous, non-aqueous or mixed media. Aqueous suspensions can further contain substances which increase the viscosity of the suspension including, for example, sodium carboxymethylcellulose, sorbitol or dextran. The suspension can also contain stabilizers.

[0454] C. Additional Formulations

[0455] i. Emulsions

[0456] The iRNAs of the present invention can be prepared and formulated as emulsions. Emulsions are typically heterogeneous systems of one liquid dispersed in another in the form of droplets usually exceeding 0.1 μm in diameter (see e.g., Ansel's Pharmaceutical Dosage Forms and Drug Delivery Systems, Allen, L V., Popovich N G., and Ansel H C., 2004, Lippincott Williams & Wilkins (8th ed.), New York, NY; Idson, in Pharmaceutical Dosage Forms, Lieberman, Rieger and Banker (Eds.), 1988, Marcel Dekker, Inc., New York, N.Y., volume 1, p. 199; Rosoff, in Pharmaceutical Dosage Forms, Lieberman, Rieger and Banker (Eds.), 1988, Marcel Dekker, Inc., New York, N.Y., Volume 1, p. 245; Block in Pharmaceutical Dosage Forms, Lieberman, Rieger and Banker (Eds.), 1988, Marcel Dekker, Inc., New York, N.Y., volume 2, p. 335; Higuchi et al., in Remington's Pharmaceutical Sciences, Mack Publishing Co., Easton, Pa., 1985, p. 301). Emulsions are often biphasic systems comprising two immiscible liquid phases intimately mixed and dispersed with each other. In general, emulsions can be of either the water-in-oil (w/o) or the oil-in-water (o/w) variety. When an aqueous phase is finely divided into and dispersed as minute droplets into a bulk oily phase, the resulting composition is called a water-in-oil (w/o) emulsion. Alternatively, when an oily phase is finely divided into and dispersed as minute droplets into a bulk aqueous phase, the resulting composition is called an oil-in-water (o/w) emulsion. Emulsions can contain additional components in addition to the dispersed phases, and the active drug which can be present as a solution either in the aqueous phase, oily phase or itself as a separate phase. Pharmaceutical excipients such as emulsifiers, stabilizers, dyes, and anti-oxidants can also be present in emulsions as needed. Pharmaceutical emulsions can also be multiple emulsions that are comprised of more than two phases such as, for example, in the case of oil-in-water-in-oil (o/w/o) and water-in-oil-in-water (w/o/w) emulsions. Such complex formulations often provide certain advantages that simple binary emulsions do not. Multiple emulsions in which individual oil droplets of an o/w emulsion enclose small water droplets constitute a w/o/w emulsion. Likewise a system of oil droplets enclosed in globules of water stabilized in an oily continuous phase provides an o/w/o emulsion.

[0457] Emulsions are characterized by little or no thermodynamic stability. Often, the dispersed or discontinuous phase of the emulsion is well dispersed into the external or continuous phase and maintained in this form through the means of emulsifiers or the viscosity of the formulation. Either of the phases of the emulsion can be a semisolid or a solid, as is the case of emulsion-style ointment bases and creams. Other means of stabilizing emulsions entail the use of emulsifiers that can be incorporated into either phase of the emulsion. Emulsifiers can broadly be classified into four categories: synthetic surfactants, naturally occurring emulsifiers, absorption bases, and finely dispersed solids (see e.g., Ansel's Pharmaceutical Dosage Forms and Drug Delivery Systems, Allen, L V., Popovich N G., and Ansel H C., 2004, Lippincott Williams & Wilkins (8th ed.), New York, NY; Idson, in Pharmaceutical Dosage Forms, Lieberman, Rieger and Banker (Eds.), 1988, Marcel Dekker, Inc., New York, N.Y., volume 1, p. 199).

[0458] Synthetic surfactants, also known as surface active agents, have found wide applicability in the formulation of emulsions and have been reviewed in the literature (see e.g., Ansel's Pharmaceutical Dosage Forms and Drug Delivery Systems, Allen, L V., Popovich N G., and Ansel H C., 2004, Lippincott Williams & Wilkins (8th ed.), New York, NY; Rieger, in Pharmaceutical Dosage Forms, Lieberman, Rieger and Banker (Eds.), 1988, Marcel Dekker, Inc., New York, N.Y., volume 1, p. 285; Idson, in Pharmaceutical Dosage Forms, Lieberman, Rieger and Banker (Eds.), Marcel Dekker, Inc., New York, N.Y., 1988, volume 1, p. 199). Surfactants are typically amphiphilic and comprise a hydrophilic and a hydrophobic portion. The ratio of the hydrophilic to the hydrophobic nature of the surfactant has been termed the hydrophile/lipophile balance (HLB) and is a valuable tool in categorizing and selecting surfactants in the preparation of formulations. Surfactants can be classified into different classes based on the nature of the hydrophilic group: nonionic, anionic, cationic, and amphoteric (see e.g., Ansel's Pharmaceutical Dosage Forms and Drug Delivery Systems, Allen, L V., Popovich N G., and Ansel H C., 2004, Lippincott Williams & Wilkins (8th ed.), New York, NY Rieger, in Pharmaceutical Dosage Forms, Lieberman, Rieger and Banker (Eds.), 1988, Marcel Dekker, Inc., New York, N.Y., volume 1, p. 285).

[0459] Naturally occurring emulsifiers used in emulsion formulations include lanolin, beeswax, phosphatides, lecithin and acacia. Absorption bases possess hydrophilic properties such that they can soak up water to form w/o emulsions yet retain their semisolid consistencies, such as anhydrous lanolin and hydrophilic petrolatum. Finely divided solids have also been used as good emulsifiers especially in combination with surfactants and in viscous preparations. These include polar inorganic solids, such as heavy metal hydroxides, nonswelling clays such as bentonite, attapulgite, hectorite, kaolin, montmorillonite, colloidal aluminum silicate, and colloidal magnesium aluminum silicate, pigments and nonpolar solids such as carbon or glyceryl tristearate.

[0460] A large variety of non-emulsifying materials are also included in emulsion formulations and contribute to the properties of emulsions. These include fats, oils, waxes, fatty acids, fatty alcohols, fatty esters, humectants, hydrophilic colloids, preservatives, and antioxidants (Block, in Pharmaceutical Dosage Forms, Lieberman, Rieger and Banker (Eds.), 1988, Marcel Dekker, Inc., New York, N.Y., volume 1, p. 335; Idson, in Pharmaceutical Dosage Forms, Lieberman, Rieger and Banker (Eds.), 1988, Marcel Dekker, Inc., New York, N.Y., volume 1, p. 199).

[0461] Hydrophilic colloids or hydrocolloids include naturally occurring gums and synthetic polymers such as polysaccharides (for example, acacia, agar, alginic acid, carrageenan, guar gum, karaya gum, and tragacanth), cellulose derivatives (for example, carboxymethylcellulose and carboxypropylcellulose), and synthetic polymers (for example, carbomers, cellulose ethers, and carboxyvinyl polymers). These disperse or swell in water to form colloidal solutions that stabilize emulsions by forming strong interfacial films around the dispersed-phase droplets and by increasing the viscosity of the external phase.

[0462] Since emulsions often contain a number of ingredients such as carbohydrates, proteins, sterols and phosphatides that can readily support the growth of microbes, these formulations often incorporate preservatives. Commonly used preservatives included in emulsion formulations include methyl paraben, propyl paraben, quaternary ammonium salts, benzalkonium chloride, esters of p-hydroxybenzoic acid, and boric acid. Antioxidants are also commonly added to emulsion formulations to prevent deterioration of the formulation. Antioxidants used can be free radical scavengers such as tocopherols, alkyl gallates, butylated hydroxyanisole, butylated hydroxytoluene, or reducing agents such as ascorbic acid and sodium metabisulfite, and antioxidant synergists such as citric acid, tartaric acid, and lecithin.

[0463] The application of emulsion formulations via dermatological, oral, and parenteral routes, and methods for their manufacture have been reviewed in the literature (see e.g., Ansel's Pharmaceutical Dosage Forms and Drug Delivery Systems, Allen, L V., Popovich N G., and Ansel H C., 2004, Lippincott Williams & Wilkins (8th ed.), New York, NY; Idson, in Pharmaceutical Dosage Forms, Lieberman, Rieger and Banker (Eds.), 1988, Marcel Dekker, Inc., New York, N.Y., volume 1, p. 199). Emulsion formulations for oral delivery have been very widely used because of ease of formulation, as well as efficacy from an absorption and bioavailability standpoint (see e.g., Ansel's Pharmaceutical Dosage Forms and Drug Delivery Systems, Allen, L V., Popovich N G., and Ansel H C., 2004, Lippincott Williams & Wilkins (8th ed.), New York, NY; Rosoff, in Pharmaceutical Dosage Forms, Lieberman, Rieger and Banker (Eds.), 1988, Marcel Dekker, Inc., New York, N.Y., volume 1, p. 245; Idson, in Pharmaceutical Dosage Forms, Lieberman, Rieger and Banker (Eds.), 1988, Marcel Dekker, Inc., New York, N.Y., volume 1, p. 199). Mineral-oil base laxatives, oil-soluble vitamins, and high fat nutritive preparations are among the materials that have commonly been administered orally as o/w emulsions.

[0464] ii. Microemulsions

[0465] In one embodiment of the present invention, the iRNAs are formulated as microemulsions. A microemulsion can be defined as a system of water, oil, and amphiphile which is a single optically isotropic and thermodynamically stable liquid solution (see e.g., Ansel's Pharmaceutical Dosage Forms and Drug Delivery Systems, Allen, L V., Popovich N G., and Ansel H C., 2004, Lippincott Williams & Wilkins (8th ed.), New York, NY; Rosoff, in Pharmaceutical Dosage Forms, Lieberman, Rieger and Banker (Eds.), 1988, Marcel Dekker, Inc., New York, N.Y., volume 1, p. 245). Typically microemulsions are systems that are prepared by first dispersing an oil in an aqueous surfactant solution and then adding a sufficient amount of a fourth component, generally an intermediate chain-length alcohol to form a transparent system. Therefore, microemulsions have also been described as thermodynamically stable, isotropically clear dispersions of two immiscible liquids that are stabilized by interfacial films of surface-active molecules (Leung and Shah, in: Controlled Release of Drugs: Polymers and Aggregate Systems, Rosoff, M., Ed., 1989, VCH Publishers, New York, pages 185-215). Microemulsions commonly are prepared via a combination of three to five components that include oil, water, surfactant, cosurfactant and electrolyte. Whether the microemulsion is of the water-in-oil (w/o) or an oil-in-water (o/w) type is dependent on the properties of the oil and surfactant used and on the structure and geometric packing of the polar heads and hydrocarbon tails of the surfactant molecules (Schott, in Remington's Pharmaceutical Sciences, Mack Publishing Co., Easton, Pa., 1985, p. 271).

[0466] The phenomenological approach utilizing phase diagrams has been extensively studied and has yielded a comprehensive knowledge, to one skilled in the art, of how to formulate microemulsions (see e.g., Ansel's Pharmaceutical Dosage Forms and Drug Delivery Systems, Allen, L V., Popovich N G., and Ansel H C., 2004, Lippincott Williams & Wilkins (8th ed.), New York, NY; Rosoff, in Pharmaceutical Dosage Forms, Lieberman, Rieger and Banker (Eds.), 1988, Marcel Dekker, Inc., New York, N.Y., volume 1, p. 245; Block, in Pharmaceutical Dosage Forms, Lieberman, Rieger and Banker (Eds.), 1988, Marcel Dekker, Inc., New York, N.Y., volume 1, p. 335). Compared to conventional emulsions, microemulsions offer the advantage of solubilizing water-insoluble drugs in a formulation of thermodynamically stable droplets that are formed spontaneously.

[0467] Surfactants used in the preparation of microemulsions include, but are not limited to, ionic surfactants, non-ionic surfactants, Brij® 96, polyoxyethylene oleyl ethers, polyglycerol fatty acid esters, tetraglycerol monolaurate (ML310), tetraglycerol monooleate (M0310), hexaglycerol monooleate (P0310), hexaglycerol pentaoleate (P0500), decaglycerol monocaprate (MCA750), decaglycerol monooleate (M0750), decaglycerol sequioleate (S0750), decaglycerol decaoleate (DA0750), alone or in combination with cosurfactants. The cosurfactant, usually a short-chain alcohol such as ethanol, l-propanol, and l-butanol, serves to increase the interfacial fluidity by penetrating into the surfactant film and consequently creating a disordered film because of the void space generated among surfactant molecules. Microemulsions can, however, be prepared without the use of cosurfactants and alcohol-free self-emulsifying microemulsion systems are known in the art. The aqueous phase can typically be, but is not limited to, water, an aqueous solution of the drug, glycerol, PEG300, PEG400, polyglycerols, propylene glycols, and derivatives of ethylene glycol. The oil phase can include, but is not limited to, materials such as Captex® 300, Captex® 355, Capmul® MCM, fatty acid esters, medium chain (C8-C12) mono, di, and tri-glycerides, polyoxyethylated glyceryl fatty acid esters, fatty alcohols, polyglycolized glycerides, saturated polyglycolized C8-C10 glycerides, vegetable oils, and silicone oil.

[0468] Microemulsions are particularly of interest from the standpoint of drug solubilization and the enhanced absorption of drugs. Lipid based microemulsions (both o/w and w/o) have been proposed to enhance the oral bioavailability of drugs, including peptides (see e.g., U.S. Pat. Nos. 6,191,105; 7,063,860; 7,070,802; 7,157,099; Constantinides et al., Pharmaceutical Research, 1994, 11, 1385-1390; Ritschel, Meth. Find. Exp. Clin. Pharmacol., 1993, 13, 205). Microemulsions afford advantages of improved drug solubilization, protection of drug from enzymatic hydrolysis, possible enhancement of drug absorption due to surfactant-induced alterations in membrane fluidity and permeability, ease of preparation, ease of oral administration over solid dosage forms, improved clinical potency, and decreased toxicity (see e.g., U.S. Pat. Nos. 6,191,105; 7,063,860; 7,070,802; 7,157,099; Constantinides et al., Pharmaceutical Research, 1994, 11, 1385; Ho et al., J. Pharm. Sci., 1996, 85, 138-143). Often microemulsions can form spontaneously when their components are brought together at ambient temperature. This can be particularly advantageous when formulating thermolabile drugs, peptides or iRNAs. Microemulsions have also been effective in the transdermal delivery of active components in both cosmetic and pharmaceutical applications. It is expected that the microemulsion compositions and formulations of the present invention will facilitate the increased systemic absorption of iRNAs and nucleic acids from the gastrointestinal tract, as well as improve the local cellular uptake of iRNAs and nucleic acids.

[0469] Microemulsions of the present invention can also contain additional components and additives such as sorbitan monostearate (Grill® 3), Labrasol®, and penetration enhancers to improve the properties of the formulation and to enhance the absorption of the iRNAs and nucleic acids of the present invention. Penetration enhancers used in the microemulsions of the present invention can be classified as belonging to one of five broad categories—surfactants, fatty acids, bile salts, chelating agents, and non-chelating non-surfactants (Lee et al., Critical Reviews in Therapeutic Drug Carrier Systems, 1991, p. 92). Each of these classes has been discussed above.

[0470] iii. Microparticles

[0471] An iRNA of the invention may be incorporated into a particle, e.g., a microparticle. Microparticles can be produced by spray-drying, but may also be produced by other methods including lyophilization, evaporation, fluid bed drying, vacuum drying, or a combination of these techniques.

[0472] iv. Penetration Enhancers

[0473] In one embodiment, the present invention employs various penetration enhancers to effect the efficient delivery of nucleic acids, particularly iRNAs, to the skin of animals. Most drugs are present in solution in both ionized and nonionized forms. However, usually only lipid soluble or lipophilic drugs readily cross cell membranes. It has been discovered that even non-lipophilic drugs can cross cell membranes if the membrane to be crossed is treated with a penetration enhancer. In addition to aiding the diffusion of non-lipophilic drugs across cell membranes, penetration enhancers also enhance the permeability of lipophilic drugs.

[0474] Penetration enhancers can be classified as belonging to one of five broad categories, i.e., surfactants, fatty acids, bile salts, chelating agents, and non-chelating non-surfactants (see e.g., Malmsten, M. Surfactants and polymers in drug delivery, Informa Health Care, New York, NY, 2002; Lee et al., Critical Reviews in Therapeutic Drug Carrier Systems, 1991, p. 92). Such compounds are well known in the art.

[0475] v. Carriers

[0476] Certain compositions of the present invention also incorporate carrier compounds in the formulation. As used herein, “carrier compound” or “carrier” can refer to a nucleic acid, or analog thereof, which is inert (i.e., does not possess biological activity per se) but is recognized as a nucleic acid by in vivo processes that reduce the bioavailability of a nucleic acid having biological activity by, for example, degrading the biologically active nucleic acid or promoting its removal from circulation. The coadministration of a nucleic acid and a carrier compound, typically with an excess of the latter substance, can result in a substantial reduction of the amount of nucleic acid recovered in the liver, kidney or other extracirculatory reservoirs, presumably due to competition between the carrier compound and the nucleic acid for a common receptor. For example, the recovery of a partially phosphorothioate dsRNA in hepatic tissue can be reduced when it is coadministered with polyinosinic acid, dextran sulfate, polycytidic acid or 4-acetamido-4′isothiocyano-stilbene-2,2′-disulfonic acid (Miyao et al., DsRNA Res. Dev., 1995, 5, 115-121; Takakura et al., DsRNA & Nucl. Acid Drug Dev., 1996, 6, 177-183.

[0477] vi. Excipients

[0478] In contrast to a carrier compound, a “pharmaceutical carrier” or “excipient” is a pharmaceutically acceptable solvent, suspending agent, or any other pharmacologically inert vehicle for delivering one or more nucleic acids to an animal. The excipient can be liquid or solid and is selected, with the planned manner of administration in mind, so as to provide for the desired bulk, consistency, etc., when combined with a nucleic acid and the other components of a given pharmaceutical composition. Typical pharmaceutical carriers include, but are not limited to, binding agents (e.g., pregelatinized maize starch, polyvinylpyrrolidone or hydroxypropyl methylcellulose, etc.); fillers (e.g., lactose and other sugars, microcrystalline cellulose, pectin, gelatin, calcium sulfate, ethyl cellulose, polyacrylates or calcium hydrogen phosphate, etc.); lubricants (e.g., magnesium stearate, talc, silica, colloidal silicon dioxide, stearic acid, metallic stearates, hydrogenated vegetable oils, corn starch, polyethylene glycols, sodium benzoate, sodium acetate, etc.); disintegrants (e.g., starch, sodium starch glycolate, etc.); and wetting agents (e.g., sodium lauryl sulphate, etc).

[0479] Pharmaceutically acceptable organic or inorganic excipients suitable for non-parenteral administration which do not deleteriously react with nucleic acids can also be used to formulate the compositions of the present invention. Suitable pharmaceutically acceptable carriers include, but are not limited to, water, salt solutions, alcohols, polyethylene glycols, gelatin, lactose, amylose, magnesium stearate, talc, silicic acid, viscous paraffin, hydroxymethylcellulose, polyvinylpyrrolidone, and the like.

[0480] Formulations for topical administration of nucleic acids can include sterile and non-sterile aqueous solutions, non-aqueous solutions in common solvents such as alcohols, or solutions of the nucleic acids in liquid or solid oil bases. The solutions can also contain buffers, diluents and other suitable additives. Pharmaceutically acceptable organic or inorganic excipients suitable for non-parenteral administration which do not deleteriously react with nucleic acids can be used.

[0481] Suitable pharmaceutically acceptable excipients include, but are not limited to, water, salt solutions, alcohol, polyethylene glycols, gelatin, lactose, amylose, magnesium stearate, talc, silicic acid, viscous paraffin, hydroxymethylcellulose, polyvinylpyrrolidone, and the like.

[0482] vii. Other Components

[0483] The compositions of the present invention can additionally contain other adjunct components conventionally found in pharmaceutical compositions, at their art-established usage levels. Thus, for example, the compositions can contain additional, compatible, pharmaceutically-active materials such as, for example, antipruritics, astringents, local anesthetics or anti-inflammatory agents, or can contain additional materials useful in physically formulating various dosage forms of the compositions of the present invention, such as dyes, flavoring agents, preservatives, antioxidants, opacifiers, thickening agents and stabilizers. However, such materials, when added, should not unduly interfere with the biological activities of the components of the compositions of the present invention. The formulations can be sterilized and, if desired, mixed with auxiliary agents, e.g., lubricants, preservatives, stabilizers, wetting agents, emulsifiers, salts for influencing osmotic pressure, buffers, colorings, flavorings or aromatic substances and the like which do not deleteriously interact with the nucleic acid(s) of the formulation.

[0484] Aqueous suspensions can contain substances which increase the viscosity of the suspension including, for example, sodium carboxymethylcellulose, sorbitol, or dextran. The suspension can also contain stabilizers.

[0485] In some embodiments, pharmaceutical compositions featured in the invention include (a) one or more iRNA and (b) one or more agents which function by a non-iRNA mechanism and which are useful in treating a KHK-associated disorder.

[0486] Toxicity and therapeutic efficacy of such compounds can be determined by standard pharmaceutical procedures in cell cultures or experimental animals, e.g., for determining the LD50 (the dose lethal to 50% of the population) and the ED50 (the dose therapeutically effective in 50% of the population). The dose ratio between toxic and therapeutic effects is the therapeutic index and it can be expressed as the ratio LD50/ED50. Compounds that exhibit high therapeutic indices are preferred.

[0487] The data obtained from cell culture assays and animal studies can be used in formulating a range of dosage for use in humans. The dosage of compositions featured herein in the invention lies generally within a range of circulating concentrations that include the ED50 with little or no toxicity. The dosage can vary within this range depending upon the dosage form employed and the route of administration utilized. For any compound used in the methods featured in the invention, the therapeutically effective dose can be estimated initially from cell culture assays. A dose can be formulated in animal models to achieve a circulating plasma concentration range of the compound or, when appropriate, of the polypeptide product of a target sequence (e.g., achieving a decreased concentration of the polypeptide) that includes the IC50 (i.e., the concentration of the test compound which achieves a half-maximal inhibition of symptoms) as determined in cell culture. Such information can be used to more accurately determine useful doses in humans. Levels in plasma can be measured, for example, by high performance liquid chromatography.

[0488] In addition to their administration, as discussed above, the iRNAs featured in the invention can be administered in combination with other known agents effective in treatment of pathological processes mediated by KHK expression. In any event, the administering physician can adjust the amount and timing of iRNA administration on the basis of results observed using standard measures of efficacy known in the art or described herein.

### VI. Methods for Inhibiting KHK Expression

[0489] The present invention also provides methods of inhibiting expression of a KHK gene in a cell. The methods include contacting a cell with an RNAi agent, e.g., double stranded RNAi agent, in an amount effective to inhibit expression of KHK in the cell, thereby inhibiting expression of KHK in the cell.

[0490] Contacting of a cell with an iRNA, e.g., a double stranded RNAi agent, may be done in vitro or in vivo. Contacting a cell in vivo with the iRNA includes contacting a cell or group of cells within a subject, e.g., a human subject, with the iRNA. Combinations of in vitro and in vivo methods of contacting a cell are also possible. Contacting a cell may be direct or indirect, as discussed above. Furthermore, contacting a cell may be accomplished via a targeting ligand, including any ligand described herein or known in the art. In preferred embodiments, the targeting ligand is a carbohydrate moiety, e.g., a GalNAc₃ ligand, or any other ligand that directs the RNAi agent to a site of interest.

[0491] The term “inhibiting,” as used herein, is used interchangeably with “reducing,” “silencing,” “downregulating”, “suppressing”, and other similar terms, and includes any level of inhibition.

[0492] The phrase “inhibiting expression of a KHK” is intended to refer to inhibition of expression of any KHK gene (such as, e.g., a mouse KHK gene, a rat KHK gene, a monkey KHK gene, or a human KHK gene) as well as variants or mutants of a KHK gene. Thus, the KHK gene may be a wild-type KHK gene, a mutant KHK gene, or a transgenic KHK gene in the context of a genetically manipulated cell, group of cells, or organism.

[0493] “Inhibiting expression of a KHK gene” includes any level of inhibition of a KHK gene, e.g., at least partial suppression of the expression of a KHK gene. The expression of the KHK gene may be assessed based on the level, or the change in the level, of any variable associated with KHK gene expression, e.g., KHK mRNA level or KHK protein level. This level may be assessed in an individual cell or in a group of cells, including, for example, a sample derived from a subject. In certain embodiments, expression is inhibition may be assessed in liver cells in a subject.

[0494] Inhibition may be assessed by a decrease in an absolute or relative level of one or more variables that are associated with KHK expression compared with a control level. The control level may be any type of control level that is utilized in the art, e.g., a pre-dose baseline level, or a level determined from a similar subject, cell, or sample that is untreated or treated with a control (such as, e.g., buffer only control or inactive agent control).

[0495] It is understood that the degree and duration of elevation of a sign of a KHK-associated disease will vary depending upon the sign. For example, lipid signs, e.g., fasting lipid levels, NAFLD, NASH, obesity; signs of liver and kidney function, and glucose or insulin response, are durable signs that will not vary in a clinically significant manner within a day or even within a week. Other markers, e.g., serum uric acid and glucose levels, and urine fructose levels, will vary within and likely between days. Blood pressure can be elevated transiently and durably in response to fructose. As fructose likely results in weight gain at least in part by reducing safety, fructose consumption in conjunction with caloric limitation may not result in weight gain.

[0496] Further, depending on the disease state in the subject, as many as one third of adults and two thirds of children malabsorb fructose (Johnson et al. (2013) Diabetes. 62:3307-3315), e.g., due to variations in expression of the GLUT5 transporter in the gut. However, repeated exposure to fructose can increase fructose absorption. Fructose metabolism has demonstrated to be different depending on the source of fructose, e.g., in high fructose corn syrup vs. in natural fruit, and at high concentrations, such as those provided by soft drinks, glucose can be converted to fructose by the polyol pathway. However, fructose will have more metabolic effects than glucose. Body composition, e.g., lean body mass, has also been demonstrated to affect fructose metabolism. Therefore, both the timing of testing and controls must be carefully selected.

[0497] In some embodiments of the methods of the invention, expression of a KHK gene, preferably expression of the KHK gene in the liver, is inhibited by at least 20%, a 25%, 30%, 35%, 40%, 45%, 50%, 55%, 60%, 65%, 70%, 75%, 80%, 85%, 90%, or 95%, or to below the level of detection of the assay as compared to an appropriate control. Further, it is understood that obtaining liver samples for monitoring expression levels is not routine in the art. Therefore, in certain embodiments, the level of KHK expression is inhibited sufficiently to provide a clinical benefit to the subject, e.g., by treating or preventing at least on sign or symptom of a KHK associated disease.

[0498] Inhibition of the expression of a KHK gene may be manifested by a reduction of the amount of mRNA expressed by a first cell or group of cells (such cells may be present, for example, in a sample derived from a subject) in which a KHK gene is transcribed and which has or have been treated (e.g., by contacting the cell or cells with an iRNA of the invention, or by administering an iRNA of the invention to a subject in which the cells are or were present) such that the expression of a KHK gene is inhibited, as compared to a second cell or group of cells substantially identical to the first cell or group of cells but which has not or have not been so treated (control cell(s) not treated with an iRNA or not treated with an iRNA targeted to the gene of interest). In preferred embodiments, the inhibition is assessed by the method provided in Example 2 in the cell type listed wherein the RNAi agent is delivered at a 10 nM concentration using the method provided therein and expressing the level of mRNA in treated cells as a percentage of the level of mRNA in control cells assessed using the PCR method provided therein and calculated using the following formula:

$$\frac{( m RNA in control cells ) - ( m RNA in treated cells )}{( m RNA in control cells )} •100 \%$$

[0499] In other embodiments, inhibition of the expression of a KHK gene may be assessed in terms of a reduction of a parameter that is functionally linked to KHK gene expression, e.g., KHK protein expression or fructose metabolism. KHK gene silencing may be determined in any cell expressing KHK, either endogenous or heterologous from an expression construct, and by any assay known in the art.

[0500] Inhibition of the expression of a KHK protein may be manifested by a reduction in the level of the KHK protein that is expressed by a cell or group of cells (e.g., the level of protein expressed in a sample derived from a subject). As explained above, for the assessment of mRNA suppression, the inhibition of protein expression levels in a treated cell or group of cells may similarly be expressed as a percentage of the level of protein in a control cell or group of cells.

[0501] A control cell or group of cells that may be used to assess the inhibition of the expression of a KHK gene includes a cell or group of cells that has not yet been contacted with an RNAi agent of the invention. For example, the control cell or group of cells may be derived from an individual subject (e.g., a human or animal subject) prior to treatment of the subject with an RNAi agent.

[0502] In certain embodiments, the level of expression of KHK in a sample is determined by detecting a transcribed polynucleotide, or portion thereof, e.g., mRNA of the KHK gene. RNA may be extracted from cells using RNA extraction techniques including, for example, using acid phenol/guanidine isothiocyanate extraction (RNAzol B; Biogenesis), RNeasy™ RNA preparation kits (Qiagen®) or PAXgene® (PreAnalytix, Switzerland). Typical assay formats utilizing ribonucleic acid hybridization include nuclear run-on assays, RT-PCR, RNase protection assays, northern blotting, in situ hybridization, and microarray analysis.

[0503] In some embodiments, the level of expression of KHK is determined using a nucleic acid probe. The term “probe”, as used herein, refers to any molecule that is capable of selectively binding to a specific KHK. Probes can be synthesized by one of skill in the art, or derived from appropriate biological preparations. Probes may be specifically designed to be labeled. Examples of molecules that can be utilized as probes include, but are not limited to, RNA, DNA, proteins, antibodies, and organic molecules.

[0504] Isolated mRNA can be used in hybridization or amplification assays that include, but are not limited to, Southern or northern analyses, polymerase chain reaction (PCR) analyses and probe arrays. One method for the determination of mRNA levels involves contacting the isolated mRNA with a nucleic acid molecule (probe) that can hybridize to KHK mRNA. In one embodiment, the mRNA is immobilized on a solid surface and contacted with a probe, for example by running the isolated mRNA on an agarose gel and transferring the mRNA from the gel to a membrane, such as nitrocellulose. In an alternative embodiment, the probe(s) are immobilized on a solid surface and the mRNA is contacted with the probe(s), for example, in an Affymetrix® gene chip array. A skilled artisan can readily adapt known mRNA detection methods for use in determining the level of KHK mRNA.

[0505] An alternative method for determining the level of expression of KHK in a sample involves the process of nucleic acid amplification or reverse transcriptase (to prepare cDNA) of for example mRNA in the sample, e.g., by RT-PCR (the experimental embodiment set forth in Mullis, 1987, U.S. Pat. No. 4,683,202), ligase chain reaction (Barany (1991) Proc. Natl. Acad. Sci. USA 88:189-193), self sustained sequence replication (Guatelli et al. (1990) Proc. Natl. Acad. Sci. USA 87:1874-1878), transcriptional amplification system (Kwoh et al. (1989) Proc. Natl. Acad. Sci. USA 86:1173-1177), Q-Beta Replicase (Lizardi et al. (1988) Bio/Technology 6:1197), rolling circle replication (Lizardi et al., U.S. Pat. No. 5,854,033) or any other nucleic acid amplification method, followed by the detection of the amplified molecules using techniques well known to those of skill in the art. These detection schemes are especially useful for the detection of nucleic acid molecules if such molecules are present in very low numbers. In particular aspects of the invention, the level of expression of KHK is determined by quantitative fluorogenic RT-PCR (i.e., the TaqMan™ System).

[0506] The expression levels of KHK mRNA may be monitored using a membrane blot (such as used in hybridization analysis such as northern, Southern, dot, and the like), or microwells, sample tubes, gels, beads or fibers (or any solid support comprising bound nucleic acids). See U.S. Pat. Nos. 5,770,722, 5,874,219, 5,744,305, 5,677,195 and 5,445,934, which are incorporated herein by reference. The determination of KHK expression level may also comprise using nucleic acid probes in solution.

[0507] In preferred embodiments, the level of mRNA expression is assessed using branched DNA (bDNA) assays or real time PCR (qPCR). The use of these methods and conditions described and exemplified in the Examples presented herein are preferred.

[0508] The level of KHK protein expression may be determined using any method known in the art for the measurement of protein levels. Such methods include, for example, electrophoresis, capillary electrophoresis, high performance liquid chromatography (HPLC), thin layer chromatography (TLC), hyperdiffusion chromatography, fluid or gel precipitin reactions, absorption spectroscopy, a colorimetric assays, spectrophotometric assays, flow cytometry, immunodiffusion (single or double), immunoelectrophoresis, western blotting, radioimmunoassay (RIA), enzyme-linked immunosorbent assays (ELISAs), immunofluorescent assays, electrochemiluminescence assays, and the like.

[0509] In some embodiments, the efficacy of the methods of the invention in the treatment of a KHK-related disease is assessed by a decrease in KHK mRNA level (by liver biopsy) or KHK.

[0510] In some embodiments, the efficacy of the methods of the invention in the treatment of KHK-associated diseasaes can be monitored by evaluating a subject for normalization of at least one sign or symptom of the disease previously displayed in the subject including, normalization of serum uric acid level, normalization of serum lipids, normalization of body weight, normalization of lipid deposition, e.g., in the liver, in the viscera; normalization of glucose or insulin responsiveness; normalization of blood sugar, normalization of kidney function, normalization of liver function, normalization of blood pressure. These symptoms may be assessed in vitro or in vivo using any method known in the art and as compared to an appropriate control. In some embodiments of the methods of the invention, the iRNA is administered to a subject such that the iRNA is delivered to a specific site within the subject. There are two KHK isoforms produced by alternative splicing of the KHK pre-mRNA. KHK-C is abundant in fructose metabolizing organs, e.g., liver, kidney, and intestines. It is highly active and responsible for most fructose metabolism. KHK-A has a lower affinity to fructose and is widely expressed in most tissues. The iRNA agents provided herein can be capable of silencing one or both KHK isoforms. In preferred embodiments, the iRNA agent is capable of silencing at least KHK-C and expression of at least the KHK-C isoform is inhibited. Studies using knockout mice have demonstrated that inhibiting expression of KHK-C is both necessary and sufficient to reduce the adverse effects observed resulting from consumption of excess fructose (see, e.g., Marek et al. (2015) Diabetes. 64:508-518). The inhibition of expression of KHK may be assessed using measurements of the level or change in the level of KHK mRNA or KHK protein in a sample derived from fluid or tissue from the specific site within the subject.

[0511] As used herein, the terms detecting or determining a level of an analyte are understood to mean performing the steps to determine if a material, e.g., protein, RNA, is present. As used herein, methods of detecting or determining include detection or determination of an anlyte level that is below the level of detection for the method used.

### VII. Methods of Treating or Preventing KHK-Associated Diseases

[0512] The present invention also provides methods of using an iRNA of the invention or a composition containing an iRNA of the invention to reduce or inhibit KHK expression in a cell. The methods include contacting the cell with a dsRNA of the invention and maintaining the cell for a time sufficient to obtain degradation of the mRNA transcript of a KHK gene, thereby inhibiting expression of the KHK gene in the cell. Reduction in gene expression can be assessed by any methods known in the art. For example, a reduction in the expression of KHK may be determined by determining the mRNA expression level of KHK, e.g., in a liver sample, using methods routine to one of ordinary skill in the art, e.g., northern blotting, qRT-PCR; by determining the protein level of KHK using methods routine to one of ordinary skill in the art, such as western blotting, immunological techniques. A reduction in the expression of KHK may also be assessed indirectly by measuring a decrease in fructose metabolism by detecting one or more indicators of fructose metabolism, e.g., the presence of fructose in the urine indicating lack of fructose metabolism. The steps of fructose metabolism are also discussed herein.

[0513] In the methods of the invention the cell may be contacted in vitro or in vivo, i.e., the cell may be within a subject.

[0514] A cell suitable for treatment using the methods of the invention may be any cell that expresses a KHK gene, preferably a KHK-C gene, typically a liver cell. A cell suitable for use in the methods of the invention may be a mammalian cell, e.g., a primate cell (such as a human cell or a non-human primate cell, e.g., a monkey cell or a chimpanzee cell), a non-primate cell (such as a cow cell, a pig cell, a camel cell, a llama cell, a horse cell, a goat cell, a rabbit cell, a sheep cell, a hamster, a guinea pig cell, a cat cell, a dog cell, a rat cell, a mouse cell, a lion cell, a tiger cell, a bear cell, or a buffalo cell), or a bird cell (e.g., a duck cell or a goose cell). In one embodiment, the cell is a human cell, e.g., a human liver cell.

[0515] KHK expression is inhibited in the cell by at least 20%, 25%, 30%, 35%, 40%, 45%, 50%, 55%, 60%, 65%, 70%, 75%, 80%, 85%, 90%, or 95%, or to a level below the level of detection of the assay.

[0516] The in vivo methods of the invention may include administering to a subject a composition containing an iRNA, where the iRNA includes a nucleotide sequence that is complementary to at least a part of an RNA transcript of the KHK gene of the mammal to be treated. When the organism to be treated is a mammal such as a human, the composition can be administered by any means known in the art including, but not limited to oral, intraperitoneal, or parenteral routes, including intracranial (e.g., intraventricular, intraparenchymal, and intrathecal), intravenous, intramuscular, subcutaneous, transdermal, airway (aerosol), nasal, rectal, and topical (including buccal and sublingual) administration. In certain embodiments, the compositions are administered by intravenous infusion or injection. In certain embodiments, the compositions are administered by subcutaneous injection.

[0517] In some embodiments, the administration is via a depot injection. A depot injection may release the iRNA in a consistent way over a prolonged time period. Thus, a depot injection may reduce the frequency of dosing needed to obtain a desired effect, e.g., a desired inhibition of KHK, or a therapeutic or prophylactic effect. A depot injection may also provide more consistent serum concentrations. Depot injections may include subcutaneous injections or intramuscular injections. In preferred embodiments, the depot injection is a subcutaneous injection.

[0518] In some embodiments, the administration is via a pump. The pump may be an external pump or a surgically implanted pump. In certain embodiments, the pump is a subcutaneously implanted osmotic pump. In other embodiments, the pump is an infusion pump. An infusion pump may be used for intravenous, subcutaneous, arterial, or epidural infusions. In preferred embodiments, the infusion pump is a subcutaneous infusion pump. In other embodiments, the pump is a surgically implanted pump that delivers the iRNA to the liver.

[0519] The mode of administration may be chosen based upon whether local or systemic treatment is desired and based upon the area to be treated. The route and site of administration may be chosen to enhance targeting.

[0520] In one aspect, the present invention also provides methods for inhibiting the expression of a KHK gene in a mammal. The methods include administering to the mammal a composition comprising a dsRNA that targets a KHK gene in a cell of the mammal and maintaining the mammal for a time sufficient to obtain degradation of the mRNA transcript of the KHK gene, thereby inhibiting expression of the KHK gene in the cell. Reduction in gene expression can be assessed by any methods known it the art and by methods, e.g. qRT-PCR, described herein. Reduction in protein production can be assessed by any methods known it the art and by methods, e.g. ELISA, described herein. In one embodiment, a puncture liver biopsy sample serves as the tissue material for monitoring the reduction in the KHK gene or protein expression.

[0521] The present invention further provides methods of treatment of a subject in need thereof. The treatment methods of the invention include administering an iRNA of the invention to a subject, e.g., a subject that would benefit from a reduction or inhibition of KHK expression, in a therapeutically effective amount of an iRNA targeting a KHK gene or a pharmaceutical composition comprising an iRNA targeting a KHK gene.

[0522] An iRNA of the invention may be administered as a “free iRNA.” A free iRNA is administered in the absence of a pharmaceutical composition. The naked iRNA may be in a suitable buffer solution. The buffer solution may comprise acetate, citrate, prolamine, carbonate, or phosphate, or any combination thereof. In one embodiment, the buffer solution is phosphate buffered saline (PBS). The pH and osmolarity of the buffer solution containing the iRNA can be adjusted such that it is suitable for administering to a subject.

[0523] Alternatively, an iRNA of the invention may be administered as a pharmaceutical composition, such as a dsRNA liposomal formulation.

[0524] Subjects that would benefit from a reduction or inhibition of KHK gene expression are those having a disorder of elevated KHK expression such as those discussed herein.

[0525] The invention further provides methods for the use of an iRNA or a pharmaceutical composition thereof, e.g., for treating a subject that would benefit from reduction or inhibition of KHK expression, e.g., a subject having a KHK-associated disease, in combination with other pharmaceuticals or other therapeutic methods, e.g., with known pharmaceuticals or known therapeutic methods, such as, for example, those which are currently employed for treating these disorders. For example, in certain embodiments, an iRNA targeting KHK is administered in combination with an agent useful in treating a KHK-associated disorder as described elsewhere herein. The agent to be administered will depend, for example, on the specific KHK-associated disease that the subject is suffering from.

[0526] The iRNA and additional therapeutic agents may be administered at the same time or in the same combination, e.g., parenterally, or the additional therapeutic agent can be administered as part of a separate composition or at separate times or by another method known in the art or described herein.

[0527] In one embodiment, the method includes administering a composition featured herein such that expression of the target KHK gene is decreased, such as for about 1, 2, 3, 4, 5, 6, 7, 8, 12, 16, 18, 24 hours, 28, 32, or about 36 hours. In one embodiment, expression of the target KHK gene is decreased for an extended duration, e.g., at least about two, three, four days or more, e.g., about one week, two weeks, three weeks, or four weeks or longer.

[0528] Preferably, the iRNAs useful for the methods and compositions featured herein specifically target RNAs (primary or processed) of the target KHK gene. Compositions and methods for inhibiting the expression of these genes using iRNAs can be prepared and performed as described herein.

[0529] Administration of the iRNA according to the methods of the invention may result in a reduction of the severity, signs, symptoms, or markers of such diseases or disorders in a patient with a disorder of elevated KHK. By “reduction” in this context is meant a statistically significant decrease in such level. The reduction (absolute reduction or reduction of the difference between the elevated level in the subject and a normal level) can be, for example, at least about 20%, 25%, 30%, 35%, 40%, 45%, 50%, 55%, 60%, 65%, 70%, 75%, 80%, 85%, 90%, or 95%, or to below the level of detection of the assay used.

[0530] Efficacy of treatment or prevention of disease can be assessed, for example by measuring disease progression, disease remission, symptom severity, reduction in pain, quality of life, dose of a medication required to sustain a treatment effect, level of a disease marker, or any other measurable parameter appropriate for a given disease being treated or targeted for prevention. It is well within the ability of one skilled in the art to monitor efficacy of treatment or prevention by measuring any one of such parameters, or any combination of parameters. As discussed herein, the specific parameters to be measured depend on the KHK-associated disease that the subject is suffering from.

[0531] Comparisons of the later readings with the initial readings provide a physician an indication of whether the treatment is effective. It is well within the ability of one skilled in the art to monitor efficacy of treatment or prevention by measuring any one of such parameters, or any combination of parameters. In connection with the administration of an iRNA targeting KHK or pharmaceutical composition thereof, “effective against” a KHK related disorder indicates that administration in a clinically appropriate manner results in a beneficial effect for at least a statistically significant fraction of patients, such as a improvement of symptoms, a cure, a reduction in disease, extension of life, improvement in quality of life, or other effect generally recognized as positive by medical doctors familiar with treating KHK-related disorders.

[0532] A treatment or preventive effect is evident when there is a statistically significant improvement in one or more parameters of disease status, or by a failure to worsen or to develop symptoms where they would otherwise be anticipated. As an example, a favorable change of at least 10% in a measurable parameter of disease, and preferably at least 20%, 30%, 40%, 50% or more can be indicative of effective treatment. Efficacy for a given iRNA drug or formulation of that drug can also be judged using an experimental animal model for the given disease as known in the art. When using an experimental animal model, efficacy of treatment is evidenced when a statistically significant reduction in a marker or symptom is observed.

[0533] Alternatively, the efficacy can be measured by a reduction in the severity of disease as determined by one skilled in the art of diagnosis based on a clinically accepted disease severity grading scale. Any positive change resulting in e.g., lessening of severity of disease measured using the appropriate scale, represents adequate treatment using an iRNA or iRNA formulation as described herein.

[0534] Subjects can be administered a therapeutic amount of iRNA, such as about 0.01 mg/kg to about 200 mg/kg.

[0535] The iRNA can be administered by intravenous infusion over a period of time, on a regular basis. In certain embodiments, after an initial treatment regimen, the treatments can be administered on a less frequent basis. Administration of the iRNA can reduce KHK levels, e.g., in a cell, tissue, blood, urine, or other compartment of the patient by at least about 20%, 25%, 30%, 35%, 40%, 45%, 50%, 55%, 60%, 65%, 70%, 75%, 80%, 85%, 90%, or 95%, or below the level of detection of the assay method used. As KHK-C is expressed in the liver, it is unlikely that treatment will be monitored by measuring KHK-C expression in the liver. In certain embodiments, the efficacy of treatment is assessed by measuring on or more signs or symptoms of the KHK-associate disease from which the subject is suffering.

[0536] Before administration of a full dose of the iRNA, patients can be administered a smaller dose, such as a 5% infusion reaction, and monitored for adverse effects, such as an allergic reaction. In another example, the patient can be monitored for unwanted immunostimulatory effects, such as increased cytokine (e.g., TNF-alpha or INF-alpha) levels.

[0537] Alternatively, the iRNA can be administered subcutaneously, i.e., by subcutaneous injection. One or more injections may be used to deliver the desired daily dose of iRNA to a subject. The injections may be repeated over a period of time. The administration may be repeated on a regular basis. In certain embodiments, after an initial treatment regimen, the treatments can be administered on a less frequent basis. A repeat-dose regimen may include administration of a therapeutic amount of iRNA on a regular basis, such as every other day or to once a year. In certain embodiments, the iRNA is administered about once per month to about once per quarter (i.e., about once every three months).

### IX. Diagnostic Criteria and Treatment for KHK-Associated Diseases

[0538] Diagnostic criteria, therapeutic agents, and considerations for treatment for various KHK-associated diseases are provided below.

### A. Hyperuricemia

[0539] Serum uric acid levels are not routinely obtained as clinical lab values. However, hyperuricemia (elevated uric acid) is associated with a number of diseases and conditions including gout, NAFLD, NASH, metabolic disorder, insulin resistance (not resulting from an immune response to insulin), cardiovascular disease, hypertension, and type 2 diabetes. It is expected that decreasing KHK expression can be useful in the prevention or treatment of one or more conditions associated with elevated serum uric acid levels. Further, it is expected that a subject would derive clinical benefit from normalization of serum uric acid levels towards or to a normal serum uric acid level, e.g., no more than 6.8 mg/dl, preferably no more than 6 mg/dl, even in the absence of overt signs or symptoms of one or more conditions associated with elevated uric acid.

[0540] Animal models of hyperuricemia include, for example, high fructose diet, e.g., in rats and mice, which can induce one or more of fat accumulation including fatty liver, insulin resistance, type 2 diabetes, obesity including visceral obesity, metabolic syndrome, decreased adiponectin secretion, reduced renal function, and inflammation (see, e.g., Johnson et al. (2013) Diabetes. 62:3307-3315). Administration of oxonic acid, a uricase inhibitor, can also be used to induce hyperuricemia (see, e.g., Mazalli et al. (2001) Hypertens. 38:1101-1106). Genetic models of hyperuricemia include the B6; 129S7-Uox^{tm1Bay}/J mouse available from Jackson Laboratory (/jaxmice.jax.org/strain/002223.html) which develops hyperuricemia, with 10-fold higher levels of serum uric acid levels.

[0541] Various treatments for hyperuricemia are known in the art. However, some of the agents can only be used in limited populations. For example, allopurinol is a xanthine oxidase inhibitor that is used to reduce serum uric acid levels for the treatment of a number of conditions, e.g., gout, cardiovascular disease including ischemia-reperfusion injury, hypertension, atherosclerosis, and stroke, and inflammatory diseases (Pacher et al., (2006) Pharma. Rev. 58:87-114). However, the use of allopurinol is contraindicated in subjects with impaired renal function, e.g., chronic kidney disease, hypothyroidism, hyperinsulinemia, or insulin resistance; or in subjects predisposed to kidney disease or impaired renal function, e.g., subjects with hypertension, metabolic disorder, diabetes, and the elderly. Further, allopurinol should not be taken by subjects taking oral coagulants or probencid as well as subjects taking diuretics, especially thiazide diuretics or other drugs that can reduce kidney function or have potential kidney toxicity.

[0542] In certain embodiments, the compositions and methods of the invention are used in combination with other compositions and methods to treat hyperuricemia, e.g., allopurinol, oxypurinol, febuxostat. In certain embodiments, the compositions and methods of the invention are used for treatment of subjects with reduced kidney function or susceptible to reduced kidney function, e.g., due to age, comorbidities, or drug interactions.

### B. Gout

[0543] Gout affects approximately 1 in 40 adults, most commonly men between 30-60 years of age. Gout less commonly affects women. Gout is one of a few types of arthritis where future damage to joints can be avoided by treatment. Gout is characterized by recurrent attacks of acute inflammatory arthritis caused by an inflammatory reaction to uric acid crystals in the joint due to hyperuricemia resulting from insufficient renal clearance of uric acid or excessive uric acid production. Fructose associated gout is sometimes associated with variants of transporters expressed in the kidney, intestine, and liver. Gout is characterized by the formation and deposition of tophi, monosodium urate (MSU) crystals, in the joints and subcutaneously. Pain associated with gout is not related to the size of the tophi, but is a result of an immune response against the MSU crystals. There is a linear inverse relation between serum uric acid and the rate of decrease in tophus size. For example, in one study of 18 patients with non-tophaceous gout, serum uric acid declined to 2.7-5.4 mg/dL (0.16-0.32 mM) in all subjects within 3 months of starting urate lowering therapy (Pascual and Sivera (2007) Ann. Rheum. Dis. 66:1056-1058). However, it took 12 months with normalized serum uric acid for MSU crystals to disappear from asymptomatic knee or first MTP joints in patients who had gout for less than 10 years, vs. 18 months in those with gout for more than 10 years. Therefore, effective treatment of gout does not require complete clearance of tophi or resolution of all symptoms, e.g., joint pain and swelling, inflammation, but simply a reduction in at least one sign or symptom of gout, e.g., reduction in severity or frequency of gout attacks, in conjunction with a reduction in serum urate levels.

[0544] Animal models of gout include oxonic acid-induced hyperuricemia (see, e.g., Jang et al. (2014) Mycobiology. 42:296-300).

[0545] Currently available treatments for gout are contraindicated or ineffective in a number of subjects. Allopurinol, a common first line treatment to reduce uric acid levels in subjects with gout, is contraindicated in a number of populations, especially those with compromised renal function, as discussed above. Further, a number of subjects fail treatment with allopurinol, e.g., subjects who suffer gout flares despite treatment, or subjects who suffer from rashes or hypersensitivity reactions associated with allopurinol.

[0546] In certain embodiments, the compositions and methods of the invention are used in combination with other agents to reduce serum uric acid. In certain embodiments, the compositions and methods of the invention are used in combination with agents for treatment of symptoms of gout, e.g., analgesic or anti-inflammatory agents, e.g., NSAIDS. In certain embodiments, the compositions and methods of the invention are used for treatment of subjects with reduced kidney function or susceptible to reduced kidney function, e.g., due to age, comorbidities, or drug interactions.

### C. Liver Disease

[0547] NAFLD is associated with hyperuricemia (Xu et al. (2015) J. Hepatol. 62:1412-1419) which, in turn, is associated with elevated fructose metabolism. The definition of nonalcoholic fatty liver disease (NAFLD) requires that (a) there is evidence of hepatic steatosis, either by imaging or by histology and (b) there are no causes for secondary hepatic fat accumulation such as significant alcohol consumption, use of steatogenic medication or hereditary disorders. In the majority of patients, NAFLD is associated with metabolic risk factors such as obesity, diabetes mellitus, and dyslipidemia. NAFLD is histologically further categorized into nonalcoholic fatty liver (NAFL) and nonalcoholic steatohepatitis (NASH). NAFL is defined as the presence of hepatic steatosis with no evidence of hepatocellular injury in the form of ballooning of the hepatocytes. NASH is defined as the presence of hepatic steatosis and inflammation with hepatocyte injury (ballooning) with or without fibrosis (Chalasani et al. (2012) Hepatol. 55:2005-2023). It is generally agreed that patients with simple steatosis have very slow, if any, histological progression, while patients with NASH can exhibit histological progression to cirrhotic-stage disease. The long term outcomes of patients with NAFLD and NASH have been reported in several studies. Their findings can be summarized as follows; (a) patients with NAFLD have increased overall mortality compared to matched control populations, (b) the most common cause of death in patients with NAFLD, NAFL, and NASH is cardiovascular disease, and (c) patients with NASH (but not NAFL) have an increased liver-related mortality rate.

[0548] Animal models of NAFLD include various high fat- or high fructose-fed animal models. Genetic models of NAFLD include the B6.129S7-Ldlr^{tm1Her}/J and the B6.129S4-Pten^{tm1Hwu}/J mice available from The Jackson Laboratory.

[0549] Treatment of NAFLD is typically to manage the conditions that resulted in development of NAFLD. For example, patients with dyslipidemia are treated with agents to normalize cholesterol or triglycerides, as needed, to treat or prevent further progression of NAFLD. Patients with type 2 diabetes are treated with agents to normalize glucose or insulin sensitivity. Lifestyle changes, e.g., changes in diet and exercise, are also used to treat NAFLD. In a mouse model of NAFLD, treatment with allopurinol both prevented the development of hepatic steatosis, but also significantly ameliorated established hepatic steatosis in mice (Xu et al., J. Hepatol. 62:1412-1419, 2015).

[0550] In certain embodiments, the compositions and methods of the invention are used in combination with other agents to reduce serum uric acid. In certain embodiments, the compositions and methods of the invention are used in combination with agents for treatment of symptoms of NAFLD. In certain embodiments, the compositions and methods of the invention are used for treatment of subjects with reduced kidney function or susceptible to reduced kidney function, e.g., due to age, comorbidities, or drug interactions.

[0551] D. Dyslipidemia, disorders of glycemic control, metabolic syndrome, and obesity Dyslipidemia (e.g., hyperlipidemia, high LDL cholesterol, low HDL cholesterol, hypertriglyceridemia, postprandial hypertriglyceridemia), disorders of glycemic control (e.g., insulin resistance, type 2 diabetes), metabolic syndrome, adipocyte dysfunction, visceral adipose deposition, obesity, and excessive sugar craving are associated with elevated fructose metabolism. Characteristics or diagnostic criteria for the conditions are provided below. Animal models of metabolic disorder and the component features include various high fat- or high fructose-fed animal models. Genetic models include leptin deficient B6.Cg-Lep^{ob}/J, commonly known as ob or ob/ob mice, which are available from The Jackson Laboratory.

[0552] Normal and abnormal fasting levels of the lipids are provided in the table below.

| Lipid | Value | | Interpretation |
|---|---|---|---|
| Total | Below 200 mg/dL | | Desirable |
| cholesterol | 200-239 | mg/dL | Borderline high |
| | 240 mg/dL and above | | High |
| LDL | Below 70 mg/dL | | Best for people who have |
| cholesterol | | | heart disease or diabetes. |
| | Below 100 mg/dL | | Optimal for people at risk |
| | | | of heart disease. |
| | 100-129 | mg/dL | Near optimal if there is |
| | | | no heart disease. High if |
| | | | there is heart disease. |
| | 130-159 | mg/dL | Borderline high if there is |
| | | | no heart disease. High if |
| | | | there is heart disease. |
| | 160-189 | mg/dL | High if there is no heart |
| | | | disease. Very high if |
| | | | there is heart disease. |
| | 190 mg/dL and above | | Very high |
| HDL | Below 40 mg/dL (men) | | Poor |
| cholesterol | Below 50 mg/dL (women) | | |
| | 50-59 | mg/dL | Moderate |
| | 60 mg/dL and above | | Normal |
| Triglycerides | Below 150 mg/dL | | Desirable |
| | 150-199 | mg/dL | Borderline high |
| | 200-499 | mg/dL | High |

| | |
|---|---|
| 500 mg/dL and above | Very High |

[0553] Postprandial hypertriglyceridemia is principally initiated by overproduction or decreased catabolism of triglyceride-rich lipoproteins (TRLs) and is a consequence of predisposing genetic variations and medical conditions such as obesity and insulin resistance.

[0554] Insulin resistance is characterized by the presence of at least one of:
[0555] 1. A fasting blood glucose level of 100-125 mg/dL taken at two different times; or
[0556] 2. An oral glucose tolerance test with a result of a glucose level of 140-199 mg/dL at 2 hours after glucose consumption.

[0557] As used herein, insulin resistance does not include a lack of response to insulin as a result of an immune response to administered insulin as often occurs in late stages of insulin dependent diabetes, especially type 1 diabetes.

[0558] Type 2 diabetes is characterized by at least one of:
[0559] 1. A fasting blood glucose level ≥126 mg/dL taken at two different times;
[0560] 2. A hemoglobin A1c (A1C) test with a result of ≥6.5% or higher; or
[0561] 3. An oral glucose tolerance test with a result of a glucose level ≥200 mg/dL at 2 hours after glucose consumption.

[0562] Pharmacological treatments for type 2 diabetes and insulin resistance include treatment with agents to normalize blood sugar such as metformin (e.g., glucophage, glumetza), sulfonylureas (e.g., glyburide, glipizide, glimepiride), meglitinides (e.g., repaglinide, nateglinide), thiazolidinediones (rosiglitazone, pioglitazone), DPP-4 inhibitors (sitagliptin, saxagliptin, linagliptin), GLP-1 receptor antagonists (exenatide, liraglutide), and SGLT2 inhibitors (e.g., canagliflozin, dapagliflozin).

[0563] Obesity is characterized as disease of excess body fat. Body mass index (BMI), which is calculated by dividing body weight in kilograms (kg) by height in meters (m) squared, provides a reasonable estimate of body fat for most, but not all, people. Generally, a BMI below 18.5 is characterized as underweight, 18-0.5 to 24.9 is normal, 25.0-29.9 is overweight, 30.0-34.9 is obese (class I), 35-39.9 is obese (class II), and 40.0 and higher is extremely obese (class III).

[0564] Methods for assessment of subcutaneous vs. visceral fat are provided, for example, in Wajchenberg (2000) Subcutaneous and visceral adipose tissue: their relation to the metabolic syndrome, Endocr Rev. 21:697-738, which is incorporated herein by reference.

[0565] Metabolic syndrome is characterized by a cluster of conditions defined as at least three of the five following metabolic risk factors:
[0566] 1. Large waistline (≥35 inches for women or ≥40 inches for men);
[0567] 2. High triglyceride level (≥150 mg/dl);
[0568] 3. Low HDL cholesterol (≤50 mg/dl for women or ≤40 mg/dl for men);
[0569] 4. Elevated blood pressure (≥130/85) or on medicine to treat high blood pressure; and
[0570] 5. High fasting blood sugar (≥100 mg/dl) or being in medicine to treat high blood sugar.

[0571] As with NAFLD, the agents for treatment of metabolic syndrome depend on the specific risk factors present, e.g., normalize lipids when lipids are abnormal, normalize glucose or insulin sensitivity when they are abnormal.

[0572] Metabolic syndrome, insulin resistance, and type 2 diabetes are often associated with decreased renal function or the potential for decreased renal function.

[0573] In certain embodiments, the compositions and methods of the invention are for use in treatment of subjects with dyslipidemia, disorders of glycemic control, metabolic syndrome, and obesity. For example, in certain embodiments, the compositions and methods of the invention are for use in subjects with metabolic syndrome, insulin resistance, or type 2 diabetes and chronic kidney disease. In certain embodiments, the compositions and methods are for use in subjects with metabolic syndrome, insulin resistance, or type 2 diabetes who are suffering from one or more of cardiovascular disease, hypothyroidism, or inflammatory disease; or elderly subjects (e.g., over 65). In certain embodiments, the compositions and methods are for use in subjects with metabolic syndrome, insulin resistance, or type 2 diabetes who are also taking a drug that can reduce kidney function as demonstrated by the drug label. For example, in certain embodiments the compositions and methods of the invention are for use in subjects with metabolic syndrome, insulin resistance, or type 2 diabetes who are being treated with oral coagulants or probencid. For example, in certain embodiments the compositions and methods of the invention are for use in subjects with metabolic syndrome, insulin resistance, or type 2 diabetes who are being treated with diuretics, especially thiazide diuretics.

[0574] In certain embodiments, the compositions and methods of the invention are used in combination with other agents to reduce serum uric acid. In certain embodiments, the compositions and methods of the invention are used in combination with agents for treatment of symptoms of metabolic syndrome, insulin resistance, or type 2 diabetes. In certain embodiments, subjects are treated with e.g., agents to decrease blood pressure, e.g., diuretics, beta-blockers, ACE inhibitors, angiotensin II receptor blockers, calcium channel blockers, alpha blockers, alpha-2 receptor antagonists, combined alpha- and beta-blockers, central agonists, peripheral adrenergic inhibitors, and blood vessel dialators; agents to decrease cholesterol, e.g., statins, selective cholesterol absorption inhibitors, resins, or lipid lowering therapies; or agents to normalize blood sugar, e.g., metformin, sulfonylureas, meglitinides, thiazolidinediones, DPP-4 inhibitors, GLP-1 receptor antagonists, and SGLT2 inhibitors.

[0575] In certain embodiments, the compositions and methods of the invention are used for treatment of subjects with reduced kidney function or susceptible to reduced kidney function, e.g., due to age, comorbidities, or drug interactions.

[0576] The iRNA and additional therapeutic agents may be administered at the same time or in the same combination, e.g., parenterally, or the additional therapeutic agent can be administered as part of a separate composition or at separate times or by another method known in the art or described herein.

### E. Cardiovascular Disease

[0577] In certain embodiments, the compositions and methods of the invention are for use in treatment of subjects with cardiovascular disease. For example, in certain embodiments, the compositions and methods of the invention are for use in subjects with cardiovascular disease and chronic kidney disease. In certain embodiments, the compositions and methods are for use in subjects with cardiovascular disease who are suffering from one or more of metabolic disorder, insulin resistance, hyperinsulinemia, diabetes, hypothyroidism, or inflammatory disease. In certain embodiments, the compositions and methods are for use in subjects with cardiovascular disease who are also taking a drug that can reduce kidney function as demonstrated by the drug label. For example, in certain embodiments the compositions and methods of the invention are for use in subjects with cardiovascular disease who are being treated with oral coagulants or probencid. For example, in certain embodiments the compositions and methods of the invention are for use in subjects with cardiovascular disease who are being treated with diuretics, especially thiazide diuretics. For example, in certain embodiments the compositions and methods of the invention are for use in subjects with cardiovascular disease who have failed treatment with allopurinol.

[0578] In certain embodiments, the compositions and methods of the invention are used in combination with other agents to reduce serum uric acid. In certain embodiments, the compositions and methods of the invention are used in combination with agents for treatment of symptoms of cardiovascular disease, e.g., agents to decrease blood pressure, e.g., diuretics, beta-blockers, ACE inhibitors, angiotensin II receptor blockers, calcium channel blockers, alpha blockers, alpha-2 receptor antagonists, combined alpha- and beta-blockers, central agonists, peripheral adrenergic inhibitors, and blood vessel dialators; or agents to decrease cholesterol, e.g., statins, selective cholesterol absorption inhibitors, resins, or lipid lowering therapies.

### F. Kidney Disease

[0579] Kidney disease includes, for example, acute kidney disorder, tubular dysfunction, proinflammatory changes to the proximal tubules, and chronic kidney disease.

[0580] Acute kidney (renal) failure occurs when the kidneys suddenly become unable to filter waste products from the blood resulting in accumulation of dangerous levels of wastes in serum and systemic chemical imbalance. Acute kidney failure can develop rapidly over a few hours or a few days, and is most common in individuals who are already hospitalized, particularly in critically ill individuals who need intensive care. Acute kidney failure can be fatal and requires intensive treatment. However, acute kidney failure may be reversible. If you're otherwise in good health, you may recover normal or nearly normal kidney function.

[0581] Chronic kidney disease, also called chronic kidney failure, describes the gradual loss of kidney function. When chronic kidney disease reaches an advanced stage, dangerous levels of fluid, electrolytes and wastes can accumulate in the body. Signs and symptoms of kidney disease may include nausea, vomiting, loss of appetite, fatigue and weakness, sleep problems, changes in urine output, decreased mental sharpness, muscle twitches and cramps, hiccups, swelling of feet and ankles, persistent itching, chest pain, if fluid builds up around the lining of the heart, shortness of breath, if fluid builds up in the lungs, high blood pressure (hypertension) that's difficult to control. Signs and symptoms of chronic kidney disease are often nonspecific and can develop slowly, and may not appear until irreversible damage has occurred.

[0582] Kidney disease is treated by removing the damaging agent or condition that is causing kidney damage, e.g. normalize blood pressure to improve kidney function, end treatment with agents that can induce kidney damage, reduce inflammation that is causing kidney damage, or by providing renal support (e.g., renal dialysis) to assist kidney function.

[0583] Renal function is typically determined using one or more routine laboratory tests, BUN (blood urea nitrogen), creatinine (blood), creatinine (urine), or creatinine clearance (see, e.g., www.nlm.nih.gov/medlineplus/ency/article/003435.htm). The tests may also be diagnostic of conditions in other organs.

[0584] Generally, a BUN level of 6 to 20 mg/dL is considered normal, although normal values may vary among different laboratories. Elevated BUN level can be indicative of kidney disease, including glomerulonephritis, pyelonephritis, and acute tubular necrosis, or kidney failure.

[0585] A normal result for blood creatinine is 0.7 to 1.3 mg/dL for men and 0.6 to 1.1 mg/dL for women. Elevated blood creatinine can be indicative of compromised kidney function due to kidney damage or failure, infection, or reduced blood flow.

[0586] Urine creatinine (24-hour sample) values can range from 500 to 2000 mg/day. Results depend on age and amount of lean body mass. Normal results are 14 to 26 mg per kg of body mass per day for men And 11 to 20 mg per kg of body mass per day for women. Abnormal results can be indicative of kidney damage, such as damage to the tubule cells, kidney failure, decreased blood flow to the kidneys, or kidney infection (pyelonephritis).

[0587] The creatinine clearance test helps provide information regarding kidney function by comparing the creatinine level in urine with the creatinine level in blood. Clearance is often measured as milliliters per minute (ml/min). Normal values are 97 to 137 ml/min. for men and 88 to 128 ml/min. for women. Lower than normal creatinine clearance can be indicative of kidney damage, such as damage to the tubule cells, kidney failure, decreased blood flow to the kidneys, or reduced glomerular filtration in the kidneys.

[0588] In certain embodiments, the compositions and methods of the invention can be used for the treatment of kidney disease. It is expected that such agents would not cause damage to the kidney.

[0589] This invention is further illustrated by the following examples which should not be construed as limiting. The entire contents of all references, patents and published patent applications cited throughout this application, as well as the Sequence Listing, are hereby incorporated herein by reference.

### EXAMPLES

### Example 1. iRNA Synthesis

### Source of Reagents

[0590] Where the source of a reagent is not specifically given herein, such reagent can be obtained from any supplier of reagents for molecular biology at a quality/purity standard for application in molecular biology.

Transcripts and siRNA Design

[0591] A set of dsRNA agents targeting human KHK (human NCBI refseqID: XM_005264298; NCBI GeneID: 3795) were designed using custom R and Python scripts. The human KHK REFSEQ mRNA has a length of 2144 bases. The rationale and method for the set of dsRNA agent designs is as follows: the predicted efficacy for every potential 19mer RNAi agent from position 10 through position 2144 was determined with a linear model derived the direct measure of mRNA knockdown from more than 20,000 distinct dsRNA agents designs targeting a large number of vertebrate genes. The custom Python script built the set of dsRNAs by systematically selecting an RNAi agent every 11 bases along the target mRNA starting at position 10. At each of the positions, the neighboring RNA agent (one position to the 5′ end of the mRNA, one position to the 3′ end of the mRNA) was swapped into the design set if the predicted efficacy was better than the efficacy at the exact every-11^{th} RNAi agent. Low complexity RNAi agents, i.e., those with Shannon Entropy measures below 1.35 were excluded from the set.

[0592] A detailed list of the unmodified KHK sense and antisense strand sequences is shown in Table 3. A detailed list of the unmodified KHK sense and antisense strand sequences is shown in Table 5.

[0593] RNAi agents were synthesized and annealed using routine methods known in the art.

### Example 2—In Vitro Screening

### Cell Culture and Transfections:

[0594] Hep3B (ATCC) cells were transfected by adding 4.9 μl of Opti-MEM plus 0.1 μl of Lipofectamine RNAiMax per well (Invitrogen®, Carlsbad CA. cat #13778-150) to 5 μl of dsRNA duplexes per well into a 384-well plate and incubated at room temperature for 15 minutes. Forty μl of EMEM containing ˜5×10³ cells were then added to the siRNA mixture. Cells were incubated for twenty-four hours prior to RNA purification. Single dose experiments were performed at 10 nM final duplex concentration.

Total RNA Isolation Using DYNABEADS mRNA Isolation Kit:

[0595] RNA was isolated using an automated protocol on a BioTek-EL406 platform using DYNABEADs (Invitrogen, cat #61012). Briefly, 50 μl of Lysis/Binding Buffer and 25 μl of lysis buffer containing 3 μl of magnetic beads were added to the plate with cells. Plates were incubated on an electromagnetic shaker for 10 minutes at room temperature and then magnetic beads were captured and the supernatant was removed. Bead-bound RNA was then washed 2 times with 150 μl Wash Buffer A and once with Wash Buffer B. Beads were then washed with 150 μl Elution Buffer, re-captured and supernatant removed.

cDNA Synthesis Using ABI High Capacity cDNA Reverse Transcription Kit (Applied Biosystems, Foster City, CA, Cat #4368813):

[0596] Ten μl of a master mix containing 1 μl 10× Buffer, 0.4 μl 25× dNTPs, 1 μl 10× Random primers, 0.5 μl Reverse Transcriptase, 0.5 μl RNase inhibitor and 6.6 μl of H₂O per reaction was added to RNA isolated above. Plates were sealed, mixed, and incubated on an electromagnetic shaker for 10 minutes at room temperature, followed by two hours 37° C.

### Real Time PCR:

[0597] Two μl of cDNA were added to a master mix containing 0.5 μl of GAPDH TaqMan Probe (Hs99999905 m1), 0.5 μl KHK probe (Hs00240827_m1) and 5 μl Lightcycler 480 probe master mix (Roche Cat #04887301001) per well in a 384 well plates (Roche cat #04887301001). Real time PCR was done in a LightCycler480 Real Time PCR system (Roche). Each duplex was tested at least two times and data were normalized to naïve cells or cells transfected with a non-targeting control siRNA.

[0598] To calculate relative fold change, real time data were analyzed using the ΔΔCt method and normalized to assays performed with cells transfected with 10 nM AD-1955, or mock transfected cells.

TABLE 2
Abbreviations of nucleotide monomers used in nucleic
acid sequence representation. It will be understood
that these monomers, when present in an oligonucleotide,
are mutually linked by 5′-3′-phosphodiester bonds.

| Abbreviation | Nucleotide(s) |
|---|---|
| A | Adenosine-3′-phosphate |
| Af | 2′-fluoroadenosine-3′-phosphate |
| Afs | 2′-fluoroadenosine-3′-phosphorothioate |
| As | adenosine-3′-phosphorothioate |
| C | cytidine-3′-phosphate |
| Cf | 2′-fluorocytidine-3′-phosphate |
| Cfs | 2′-fluorocytidine-3′-phosphorothioate |
| Cs | cytidine-3′-phosphorothioate |
| G | guanosine-3′-phosphate |
| Gf | 2′-fluoroguanosine-3′-phosphate |
| Gfs | 2′-fluoroguanosine-3′-phosphorothioate |
| Gs | guanosine-3′-phosphorothioate |
| T | 5′-methyluridine-3′-phosphate |
| Tf | 2′-fluoro-5-methyluridine-3′-phosphate |
| Tfs | 2′-fluoro-5-methyluridine-3′-phosphorothioate |
| Ts | 5-methyluridine-3′-phosphorothioate |
| U | Uridine-3′-phosphate |
| Uf | 2′-fluorouridine-3′-phosphate |
| Ufs | 2′-fluorouridine-3′-phosphorothioate |
| Us | uridine-3′-phosphorothioate |
| N | any nucleotide (G, A, C, T or U) |
| a | 2′-O-methyladenosine-3′-phosphate |
| as | 2′-O-methyladenosine-3′-phosphorothioate |
| c | 2′-O-methylcytidine-3′-phosphate |
| cs | 2′-O-methylcytidine-3′-phosphorothioate |
| g | 2′-O-methylguanosine-3′-phosphate |
| gs | 2′-O-methylguanosine-3′-phosphorothioate |
| t | 2′-O-methyl-5-methyluridine-3′-phosphate |
| ts | 2′-O-methyl-5-methyluridine-3′-phosphorothioate |
| u | 2′-O-methyluridine-3′-phosphate |
| us | 2′-O-methyluridine-3′-phosphorothioate |
| s | phosphorothioate linkage |
| L96 | N-[tris(GalNAc-alkyl)-amidodecanoyl)]- |
| | 4-hydroxyprolinol Hyp-(GalNAc-alkyl)3 |
| dT | 2′-deoxythymidinc-3′-phosphate |
| dC | 2′-deoxycytidinc-3′-phosphate |
| Y44 | inverted abasic DNA (2-hydroxymethyl- |
| | tetrahydrofurane-5-phosphate) |
| (Tgn) | Thymidine-glycol nucleic acid (GNA) S-Isomer |
| P | Phosphate |
| VP | Vinyl-phosphate |
| (Aam) | 2′-O-(N-methylacetamide)adenosine-3′-phosphate |

TABLE 3
Unmodified Sense and Antisense Strand Sequences of KHK dsRNAs

| | Sense | | | | | | | |
|---|---|---|---|---|---|---|---|---|
| Duplex | Oligo | | SEQ ID | | Antisense | | SEQ ID | |
| Name | Name | Sense Sequence | NO | Range | Oligo Name | Antisense Sequence | NO | Range |
| AD-72250 | A-144811 | AGGCAGGGCUGCAGAUGCG | 17 | 13-31 | A-144812 | CGCAUCUGCAGCCCUGCCU | 199 | 13-31 |
| AD-72251 | A-144813 | GCAGAUGCGAGGCCCAGCU | 18 | 23-41 | A-144814 | AGCUGGGCCUCGCAUCUGC | 200 | 23-41 |
| AD-72252 | A-144815 | GCCCAGCUGUACCUCGCGU | 19 | 34-52 | A-144816 | ACGCGAGGUACAGCUGGGC | 201 | 34-52 |
| AD-72253 | A-144817 | ACCUCGCGUGUCCCGGGUC | 20 | 44-62 | A-144818 | GACCCGGGACACGCGAGGU | 202 | 44-62 |
| AD-72254 | A-144819 | CCGGGUCGGGAGUCGGAGA | 21 | 56-74 | A-144820 | UCUCCGACUCCCGACCCGG | 203 | 56-74 |
| AD-72255 | A-144821 | UCGGAGACGCAGGUGCAGG | 22 | 68-86 | A-144822 | CCUGCACCUGCGUCUCCGA | 204 | 68-86 |
| AD-72256 | A-144823 | CAGGUGCAGGAGAGUGCGG | 23 | 77-95 | A-144824 | CCGCACUCUCCUGCACCUG | 205 | 77-95 |
| AD-72257 | A-144825 | AGUGCGGGGCAAGUAGCGC | 24 | 89-107 | A-144826 | GCGCUACUUGCCCCGCACU | 206 | 89-107 |
| AD-72258 | A-144827 | AAGUAGCGCAUUUUCUCUU | 25 | 99-117 | A-144828 | AAGAGAAAAUGCGCUACUU | 207 | 99-117 |
| AD-72259 | A-144829 | UUCUCUUUGCAUUCUCGAG | 26 | 111-129 | A-144830 | CUCGAGAAUGCAAAGAGAA | 208 | 111-129 |
| AD-72260 | A-144831 | UUCUCGAGAUCGCUUAGCC | 27 | 122-140 | A-144832 | GGCUAAGCGAUCUCGAGAA | 209 | 122-140 |
| AD-72261 | A-144835 | UUUAAAAAGGUUUGCAUCA | 28 | 145-163 | A-144836 | UGAUGCAAACCUUUUUAAA | 210 | 145-163 |
| AD-72262 | A-144837 | UUGCAUCAGCUGUGAGUCC | 29 | 156-174 | A-144838 | GGACUCACAGCUGAUGCAA | 211 | 156-174 |
| AD-72263 | A-144839 | UGUGAGUCCAUCUGACAAG | 30 | 166-184 | A-144840 | CUUGUCAGAUGGACUCACA | 212 | 166-184 |
| AD-72264 | A-144841 | UCUGACAAGCGAGGAAACU | 31 | 176-194 | A-144842 | AGUUUCCUCGCUUGUCAGA | 213 | 176-194 |
| AD-72265 | A-144843 | GAAACUAAGGCUGAGAAGU | 32 | 189-207 | A-144844 | ACUUCUCAGCCUUAGUUUC | 214 | 189-207 |
| AD-72266 | A-144845 | CUGAGAAGUGGGAGGCGUU | 33 | 199-217 | A-144846 | AACGCCUCCCACUUCUCAG | 215 | 199-217 |
| AD-72267 | A-144847 | AGGCGUUGCCAUCUGCAGG | 34 | 211-229 | A-144848 | CCUGCAGAUGGCAACGCCU | 216 | 211-229 |
| AD-72268 | A-144849 | UCUGCAGGCCCAGGCAACC | 35 | 222-240 | A-144850 | GGUUGCCUGGGCCUGCAGA | 217 | 222-240 |
| AD-72269 | A-144851 | AGGCAACCUGCUACGGGAA | 36 | 233-251 | A-144852 | UUCCCGUAGCAGGUUGCCU | 218 | 233-251 |
| AD-72270 | A-144853 | UACGGGAAGACCGGGGACC | 37 | 244-262 | A-144854 | GGUCCCCGGUCUUCCCGUA | 219 | 244-262 |
| AD-72271 | A-144855 | CGGGGACCAAGACCUCUGG | 38 | 255-273 | A-144856 | CCAGAGGUCUUGGUCCCCG | 220 | 255-273 |
| AD-72272 | A-144857 | AGACCUCUGGGUUGGCUUU | 39 | 264-282 | A-144858 | AAAGCCAACCCAGAGGUCU | 221 | 264-282 |
| AD-72273 | A-144859 | UUGGCUUUCCUAGACCCGC | 40 | 275-293 | A-144860 | GCGGGUCUAGGAAAGCCAA | 222 | 275-293 |
| AD-72274 | A-144861 | AGACCCGCUCGGGUCUUCG | 41 | 286-304 | A-144862 | CGAAGACCCGAGCGGGUCU | 223 | 286-304 |
| AD-72275 | A-144863 | UCUUCGGGUGUCGCGAGGA | 42 | 299-317 | A-144864 | UCCUCGCGACACCCGAAGA | 224 | 299-317 |
| AD-72276 | A-144865 | CGCGAGGAAGGGCCCUGCU | 43 | 310-328 | A-144866 | AGCAGGGCCCUUCCUCGCG | 225 | 310-328 |
| AD-72277 | A-144867 | GGGCCCUGCUCCUUUCGUU | 44 | 319-337 | A-144868 | AACGAAAGGAGCAGGGCCC | 226 | 319-337 |
| AD-72278 | A-144871 | UGCACCCCUGGCCGCUGCA | 45 | 341-359 | A-144872 | UGCAGCGGCCAGGGGUGCA | 227 | 341-359 |
| AD-72279 | A-144873 | CCGCUGCAGGUGGCUCCCU | 46 | 352-370 | A-144874 | AGGGAGCCACCUGCAGCGG | 228 | 352-370 |
| AD-72280 | A-144875 | GCUCCCUGGAGGAGGAGCU | 47 | 364-382 | A-144876 | AGCUCCUCCUCCAGGGAGC | 229 | 364-382 |
| AD-72281 | A-144877 | AGGAGCUCCCACGCGGAGG | 48 | 376-394 | A-144878 | CCUCCGCGUGGGAGCUCCU | 230 | 376-394 |
| AD-72282 | A-144879 | ACGCGGAGGAGGAGCCAGG | 49 | 386-404 | A-144880 | CCUGGCUCCUCCUCCGCGU | 231 | 386-404 |
| AD-72283 | A-144881 | AGCCAGGGCAGCUGGGAGC | 50 | 398-416 | A-144882 | GCUCCCAGCUGCCCUGGCU | 232 | 398-416 |
| AD-72284 | A-144883 | CUGGGAGCGGGGACACCAU | 51 | 409-427 | A-144884 | AUGGUGUCCCCGCUCCCAG | 233 | 409-427 |
| AD-72285 | A-144885 | GGACACCAUCCUCCUGGAU | 52 | 419-437 | A-144886 | AUCCAGGAGGAUGGUGUCC | 234 | 419-437 |
| AD-72286 | A-144887 | CCUGGAUAAGAGGCAGAGG | 53 | 431-449 | A-144888 | CCUCUGCCUCUUAUCCAGG | 235 | 431-449 |
| AD-72287 | A-144889 | AGGCAGAGGCCGGGAGGAA | 54 | 441-459 | A-144890 | UUCCUCCCGGCCUCUGCCU | 236 | 441-459 |
| AD-72288 | A-144891 | GGAGGAACCCCGUCAGCCG | 55 | 453-471 | A-144892 | CGGCUGACGGGGUUCCUCC | 237 | 453-471 |
| AD-72289 | A-144893 | CGUCAGCCGGGCGGGCAGG | 56 | 463-481 | A-144894 | CCUGCCCGCCCGGCUGACG | 238 | 463-481 |
| AD-72290 | A-144895 | CGGGCAGGAAGCUCUGGGA | 57 | 474-492 | A-144896 | UCCCAGAGCUUCCUGCCCG | 239 | 474-492 |
| AD-72291 | A-144897 | UCUGGGAGUAGCCUCAUGG | 58 | 486-504 | A-144898 | CCAUGAGGCUACUCCCAGA | 240 | 486-504 |
| AD-72292 | A-144899 | AGCCUCAUGGAAGAGAAGC | 59 | 495-513 | A-144900 | GCUUCUCUUCCAUGAGGCU | 241 | 495-513 |
| AD-72293 | A-144901 | AGAAGCAGAUCCUGUGCGU | 60 | 508-526 | A-144902 | ACGCACAGGAUCUGCUUCU | 242 | 508-526 |
| AD-72294 | A-144903 | CUGUGCGUGGGGCUAGUGG | 61 | 519-537 | A-144904 | CCACUAGCCCCACGCACAG | 243 | 519-537 |
| AD-72295 | A-144905 | GGCUAGUGGUGCUGGACGU | 62 | 529-547 | A-144906 | ACGUCCAGCACCACUAGCC | 244 | 529-547 |
| AD-72296 | A-144907 | UGGACGUCAUCAGCCUGGU | 63 | 541-559 | A-144908 | ACCAGGCUGAUGACGUCCA | 245 | 541-559 |
| AD-72297 | A-144909 | AGCCUGGUGGACAAGUACC | 64 | 552-570 | A-144910 | GGUACUUGUCCACCAGGCU | 246 | 552-570 |
| AD-72298 | A-144911 | ACAAGUACCCUAAGGAGGA | 65 | 562-580 | A-144912 | UCCUCCUUAGGGUACUUGU | 247 | 562-580 |
| AD-72299 | A-144913 | AAGGAGGACUCGGAGAUAA | 66 | 573-591 | A-144914 | UUAUCUCCGAGUCCUCCUU | 248 | 573-591 |
| AD-72300 | A-144915 | CGGAGAUAAGGAGCCUGCC | 67 | 583-601 | A-144916 | GGCAGGCUCCUUAUCUCCG | 249 | 583-601 |
| AD-72301 | A-144917 | AGCCUGCCAGAUGUGUCUG | 68 | 594-612 | A-144918 | CAGACACAUCUGGCAGGCU | 250 | 594-612 |
| AD-72302 | A-144919 | UGUGUCUGCUACAGACUUU | 69 | 605-623 | A-144920 | AAAGUCUGUAGCAGACACA | 251 | 605-623 |
| AD-72303 | A-144921 | CAGACUUUGAGAAGGUUGA | 70 | 616-634 | A-144922 | UCAACCUUCUCAAAGUCUG | 252 | 616-634 |
| AD-72304 | A-144923 | AGGUUGAUCUGACCCAGUU | 71 | 628-646 | A-144924 | AACUGGGUCAGAUCAACCU | 253 | 628-646 |
| AD-72305 | A-144925 | ACCCAGUUCAAGUGGAUCC | 72 | 639-657 | A-144926 | GGAUCCACUUGAACUGGGU | 254 | 639-657 |
| AD-72306 | A-144927 | AGUGGAUCCACAUUGAGGG | 73 | 649-667 | A-144928 | CCCUCAAUGUGGAUCCACU | 255 | 649-667 |
| AD-72307 | A-144929 | UUGAGGGCCGGAACGCAUC | 74 | 661-679 | A-144930 | GAUGCGUUCCGGCCCUCAA | 256 | 661-679 |
| AD-72308 | A-144931 | AACGCAUCGGAGCAGGUGA | 75 | 672-690 | A-144932 | UCACCUGCUCCGAUGCGUU | 257 | 672-690 |
| AD-72309 | A-144933 | AGCAGGUGAAGAUGCUGCA | 76 | 682-700 | A-144934 | UGCAGCAUCUUCACCUGCU | 258 | 682-700 |
| AD-72310 | A-144935 | UGCUGCAGCGGAUAGACGC | 77 | 694-712 | A-144936 | GCGUCUAUCCGCUGCAGCA | 259 | 694-712 |
| AD-72311 | A-144937 | AUAGACGCACACAACACCA | 78 | 705-723 | A-144938 | UGGUGUUGUGUGCGUCUAU | 260 | 705-723 |
| AD-72312 | A-144941 | CAGCCUCCAGAGCAGAAGA | 79 | 726-744 | A-144942 | UCUUCUGCUCUGGAGGCUG | 261 | 726-744 |
| AD-72313 | A-144943 | AGAAGAUCCGGGUGUCCGU | 80 | 739-757 | A-144944 | ACGGACACCCGGAUCUUCU | 262 | 739-757 |
| AD-72314 | A-144945 | GUGUCCGUGGAGGUGGAGA | 81 | 750-768 | A-144946 | UCUCCACCUCCACGGACAC | 263 | 750-768 |
| AD-72315 | A-144947 | AGGUGGAGAAGCCACGAGA | 82 | 760-778 | A-144948 | UCUCGUGGCUUCUCCACCU | 264 | 760-778 |
| AD-72316 | A-144949 | CCACGAGAGGAGCUCUUCC | 83 | 771-789 | A-144950 | GGAAGAGCUCCUCUCGUGG | 265 | 771-789 |
| AD-72317 | A-144951 | AGCUCUUCCAGCUGUUUGG | 84 | 781-799 | A-144952 | CCAAACAGCUGGAAGAGCU | 266 | 781-799 |
| AD-72318 | A-144953 | UGUUUGGCUACGGAGACGU | 85 | 793-811 | A-144954 | ACGUCUCCGUAGCCAAACA | 267 | 793-811 |
| AD-72319 | A-144955 | GGAGACGUGGUGUUUGUCA | 86 | 804-822 | A-144956 | UGACAAACACCACGUCUCC | 268 | 804-822 |
| AD-72320 | A-144957 | UUUGUCAGCAAAGAUGUGG | 87 | 816-834 | A-144958 | CCACAUCUUUGCUGACAAA | 269 | 816-834 |
| AD-72321 | A-144959 | AAAGAUGUGGCCAAGCACU | 88 | 825-843 | A-144960 | AGUGCUUGGCCACAUCUUU | 270 | 825-843 |
| AD-72322 | A-144961 | AAGCACUUGGGGUUCCAGU | 89 | 837-855 | A-144962 | ACUGGAACCCCAAGUGCUU | 271 | 837-855 |
| AD-72323 | A-144963 | UUCCAGUCAGCAGAGGAAG | 90 | 849-867 | A-144964 | CUUCCUCUGCUGACUGGAA | 272 | 849-867 |
| AD-72324 | A-144965 | AGAGGAAGCCUUGAGGGGC | 91 | 860-878 | A-144966 | GCCCCUCAAGGCUUCCUCU | 273 | 860-878 |
| AD-72325 | A-144967 | UUGAGGGGCUUGUAUGGUC | 92 | 870-888 | A-144968 | GACCAUACAAGCCCCUCAA | 274 | 870-888 |
| AD-72326 | A-144969 | UAUGGUCGUGUGAGGAAAG | 93 | 882-900 | A-144970 | CUUUCCUCACACGACCAUA | 275 | 882-900 |
| AD-72327 | A-144971 | UGAGGAAAGGGGCUGUGCU | 94 | 892-910 | A-144972 | AGCACAGCCCCUUUCCUCA | 276 | 892-910 |
| AD-72328 | A-144975 | CUGUGCCUGGGCUGAGGAG | 95 | 914-932 | A-144976 | CUCCUCAGCCCAGGCACAG | 277 | 914-932 |
| AD-72329 | A-144977 | UGAGGAGGGCGCCGACGCC | 96 | 926-944 | A-144978 | GGCGUCGGCGCCCUCCUCA | 278 | 926-944 |
| AD-72330 | A-144979 | CCGACGCCCUGGGCCCUGA | 97 | 937-955 | A-144980 | UCAGGGCCCAGGGCGUCGG | 279 | 937-955 |
| AD-72331 | A-144981 | UGGGCCCUGAUGGCAAAUU | 98 | 946-964 | A-144982 | AAUUUGCCAUCAGGGCCCA | 280 | 946-964 |
| AD-72332 | A-144983 | CAAAUUGCUCCACUCGGAU | 99 | 959-977 | A-144984 | AUCCGAGUGGAGCAAUUUG | 281 | 959-977 |
| AD-72333 | A-144985 | ACUCGGAUGCUUUCCCGCC | 100 | 970-988 | A-144986 | GGCGGGAAAGCAUCCGAGU | 282 | 970-988 |
| AD-72334 | A-144987 | UUUCCCGCCACCCCGCGUG | 101 | 980-998 | A-144988 | CACGCGGGGUGGCGGGAAA | 283 | 980-998 |
| AD-72335 | A-144989 | CCGCGUGGUGGAUACACUG | 102 | 992-1010 | A-144990 | CAGUGUAUCCACCACGCGG | 284 | 992-1010 |
| AD-72336 | A-144991 | AUACACUGGGAGCUGGAGA | 103 | 1003-1021 | A-144992 | UCUCCAGCUCCCAGUGUAU | 285 | 1003-1021 |
| AD-72337 | A-144993 | AGCUGGAGACACCUUCAAU | 104 | 1013-1031 | A-144994 | AUUGAAGGUGUCUCCAGCU | 286 | 1013-1031 |
| AD-72338 | A-144995 | ACCUUCAAUGCCUCCGUCA | 105 | 1023-1041 | A-144996 | UGACGGAGGCAUUGAAGGU | 287 | 1023-1041 |
| AD-72339 | A-144997 | UCCGUCAUCUUCAGCCUCU | 106 | 1035-1053 | A-144998 | AGAGGCUGAAGAUGACGGA | 288 | 1035-1053 |
| AD-72498 | A-144999 | AGCCUCUCCCAGGGGAGGA | 107 | 1047-1065 | A-145000 | UCCUCCCCUGGGAGAGGCU | 289 | 1047-1065 |
| AD-72499 | A-145003 | UGCAGGAAGCACUGAGAUU | 108 | 1069-1087 | A-145004 | AAUCUCAGUGCUUCCUGCA | 290 | 1069-1087 |
| AD-72500 | A-145005 | CUGAGAUUCGGGUGCCAGG | 109 | 1080-1098 | A-145006 | CCUGGCACCCGAAUCUCAG | 291 | 1080-1098 |
| AD-72501 | A-145007 | GGUGCCAGGUGGCCGGCAA | 110 | 1090-1108 | A-145008 | UUGCCGGCCACCUGGCACC | 292 | 1090-1108 |
| AD-72502 | A-145011 | AGUGUGGCCUGCAGGGCUU | 111 | 1111-1129 | A-145012 | AAGCCCUGCAGGCCACACU | 293 | 1111-1129 |
| AD-72503 | A-145013 | CAGGGCUUUGAUGGCAUCG | 112 | 1122-1140 | A-145014 | CGAUGCCAUCAAAGCCCUG | 294 | 1122-1140 |
| AD-72504 | A-145015 | GCAUCGUGUGAGAGCAGGU | 113 | 1135-1153 | A-145016 | ACCUGCUCUCACACGAUGC | 295 | 1135-1153 |
| AD-72505 | A-145017 | AGAGCAGGUGCCGGCUCCU | 114 | 1145-1163 | A-145018 | AGGAGCCGGCACCUGCUCU | 296 | 1145-1163 |
| AD-72506 | A-145019 | CCGGCUCCUCACACACCAU | 115 | 1155-1173 | A-145020 | AUGGUGUGUGAGGAGCCGG | 297 | 1155-1173 |
| AD-72507 | A-145021 | CACACCAUGGAGACUACCA | 116 | 1166-1184 | A-145022 | UGGUAGUCUCCAUGGUGUG | 298 | 1166-1184 |
| AD-72508 | A-145023 | ACUACCAUUGCGGCUGCAU | 117 | 1178-1196 | A-145024 | AUGCAGCCGCAAUGGUAGU | 299 | 1178-1196 |
| AD-72509 | A-145025 | CGGCUGCAUCGCCUUCUCC | 118 | 1188-1206 | A-145026 | GGAGAAGGCGAUGCAGCCG | 300 | 1188-1206 |
| AD-72510 | A-145027 | UUCUCCCCUCCAUCCAGCC | 119 | 1201-1219 | A-145028 | GGCUGGAUGGAGGGGAGAA | 301 | 1201-1219 |
| AD-72511 | A-145029 | AUCCAGCCUGGCGUCCAGG | 120 | 1212-1230 | A-145030 | CCUGGACGCCAGGCUGGAU | 302 | 1212-1230 |
| AD-72512 | A-145031 | GGCGUCCAGGUUGCCCUGU | 121 | 1221-1239 | A-145032 | ACAGGGCAACCUGGACGCC | 303 | 1221-1239 |
| AD-72513 | A-145033 | CCCUGUUCAGGGGACAGAU | 122 | 1234-1252 | A-145034 | AUCUGUCCCCUGAACAGGG | 304 | 1234-1252 |
| AD-72514 | A-145035 | GGGGACAGAUGCAAGCUGU | 123 | 1243-1261 | A-145036 | ACAGCUUGCAUCUGUCCCC | 305 | 1243-1261 |
| AD-72515 | A-145037 | CAAGCUGUGGGGAGGACUC | 124 | 1254-1272 | A-145038 | GAGUCCUCCCCACAGCUUG | 306 | 1254-1272 |
| AD-72516 | A-145039 | AGGACUCUGCCUGUGUCCU | 125 | 1266-1284 | A-145040 | AGGACACAGGCAGAGUCCU | 307 | 1266-1284 |
| AD-72517 | A-145041 | CUGUGUCCUGUGUUCCCCA | 126 | 1276-1294 | A-145042 | UGGGGAACACAGGACACAG | 308 | 1276-1294 |
| AD-72518 | A-145043 | UUCCCCACAGGGAGAGGCU | 127 | 1288-1306 | A-145044 | AGCCUCUCCCUGUGGGGAA | 309 | 1288-1306 |
| AD-72519 | A-145045 | AGAGGCUCUGGGGGGAUGG | 128 | 1300-1318 | A-145046 | CCAUCCCCCCAGAGCCUCU | 310 | 1300-1318 |
| AD-72520 | A-145047 | GGGGGGAUGGCUGGGGGAU | 129 | 1309-1327 | A-145048 | AUCCCCCAGCCAUCCCCCC | 311 | 1309-1327 |
| AD-72521 | A-145049 | UGGGGGAUGCAGAGCCUCA | 130 | 1320-1338 | A-145050 | UGAGGCUCUGCAUCCCCCA | 312 | 1320-1338 |
| AD-72522 | A-145051 | AGCCUCAGAGCAAAUAAAU | 131 | 1332-1350 | A-145052 | AUUUAUUUGCUCUGAGGCU | 313 | 1332-1350 |
| AD-72523 | A-145053 | AAAUAAAUCUUCCUCAGAG | 132 | 1343-1361 | A-145054 | CUCUGAGGAAGAUUUAUUU | 314 | 1343-1361 |
| AD-72524 | A-145055 | CCUCAGAGCCAGCUUCUCC | 133 | 1354-1372 | A-145056 | GGAGAAGCUGGCUCUGAGG | 315 | 1354-1372 |
| AD-72525 | A-145057 | AGCUUCUCCUCUCAAUGUC | 134 | 1364-1382 | A-145058 | GACAUUGAGAGGAGAAGCU | 316 | 1364-1382 |
| AD-72526 | A-145059 | UCAAUGUCUGAACUGCUCU | 135 | 1375-1393 | A-145060 | AGAGCAGUUCAGACAUUGA | 317 | 1375-1393 |
| AD-72527 | A-145061 | UGCUCUGGCUGGGCAUUCC | 136 | 1388-1406 | A-145062 | GGAAUGCCCAGCCAGAGCA | 318 | 1388-1406 |
| AD-72528 | A-145063 | UGGGCAUUCCUGAGGCUCU | 137 | 1397-1415 | A-145064 | AGAGCCUCAGGAAUGCCCA | 319 | 1397-1415 |
| AD-72529 | A-145065 | GAGGCUCUGACUCUUCGAU | 138 | 1408-1426 | A-145066 | AUCGAAGAGUCAGAGCCUC | 320 | 1408-1426 |
| AD-72530 | A-145071 | CCAUUCCCCAAAUUAACCU | 139 | 1442-1460 | A-145072 | AGGUUAAUUUGGGGAAUGG | 321 | 1442-1460 |
| AD-72531 | A-145073 | UUAACCUCUCCGCCCAGGC | 140 | 1454-1472 | A-145074 | GCCUGGGCGGAGAGGUUAA | 322 | 1454-1472 |
| AD-72532 | A-145075 | GCCCAGGCCCAGAGGAGGG | 141 | 1465-1483 | A-145076 | CCCUCCUCUGGGCCUGGGC | 323 | 1465-1483 |
| AD-72533 | A-145077 | CAGAGGAGGGGCUGCCUGG | 142 | 1474-1492 | A-145078 | CCAGGCAGCCCCUCCUCUG | 324 | 1474-1492 |
| AD-72534 | A-145079 | UGCCUGGGCUAGAGCAGCG | 143 | 1486-1504 | A-145080 | CGCUGCUCUAGCCCAGGCA | 325 | 1486-1504 |
| AD-72535 | A-145081 | AGAGCAGCGAGAAGUGCCC | 144 | 1496-1514 | A-145082 | GGGCACUUCUCGCUGCUCU | 326 | 1496-1514 |
| AD-72536 | A-145083 | AAGUGCCCUGGGCUUGCCA | 145 | 1507-1525 | A-145084 | UGGCAAGCCCAGGGCACUU | 327 | 1507-1525 |
| AD-72537 | A-145085 | UUGCCACCAGCUCUGCCCU | 146 | 1520-1538 | A-145086 | AGGGCAGAGCUGGUGGCAA | 328 | 1520-1538 |
| AD-72538 | A-145087 | CUCUGCCCUGGCUGGGGAG | 147 | 1530-1548 | A-145088 | CUCCCCAGCCAGGGCAGAG | 329 | 1530-1548 |
| AD-72539 | A-145089 | GCUGGGGAGGACACUCGGU | 148 | 1540-1558 | A-145090 | ACCGAGUGUCCUCCCCAGC | 330 | 1540-1558 |
| AD-72540 | A-145093 | ACACCCAGUGAACCUGCCA | 149 | 1564-1582 | A-145094 | UGGCAGGUUCACUGGGUGU | 331 | 1564-1582 |
| AD-72541 | A-145095 | AACCUGCCAAAGAAACCGU | 150 | 1574-1592 | A-145096 | ACGGUUUCUUUGGCAGGUU | 332 | 1574-1592 |
| AD-72542 | A-145097 | AGAAACCGUGAGAGCUCUU | 151 | 1584-1602 | A-145098 | AAGAGCUCUCACGGUUUCU | 333 | 1584-1602 |
| AD-72543 | A-145099 | GCUCUUCGGGGCCCUGCGU | 152 | 1597-1615 | A-145100 | ACGCAGGGCCCCGAAGAGC | 334 | 1597-1615 |
| AD-72544 | A-145101 | CCCUGCGUUGUGCAGACUC | 153 | 1608-1626 | A-145102 | GAGUCUGCACAACGCAGGG | 335 | 1608-1626 |
| AD-72545 | A-145103 | UGCAGACUCUAUUCCCACA | 154 | 1618-1636 | A-145104 | UGUGGGAAUAGAGUCUGCA | 336 | 1618-1636 |
| AD-72546 | A-145105 | UUCCCACAGCUCAGAAGCU | 155 | 1629-1647 | A-145106 | AGCUUCUGAGCUGUGGGAA | 337 | 1629-1647 |
| AD-72547 | A-145107 | CAGAAGCUGGGAGUCCACA | 156 | 1640-1658 | A-145108 | UGUGGACUCCCAGCUUCUG | 338 | 1640-1658 |
| AD-72548 | A-145109 | GAGUCCACACCGCUGAGCU | 157 | 1650-1668 | A-145110 | AGCUCAGCGGUGUGGACUC | 339 | 1650-1668 |
| AD-72549 | A-145111 | UGAGCUGAACUGACAGGCC | 158 | 1663-1681 | A-145112 | GGCCUGUCAGUUCAGCUCA | 340 | 1663-1681 |
| AD-72550 | A-145113 | UGACAGGCCAGUGGGGGGC | 159 | 1673-1691 | A-145114 | GCCCCCCACUGGCCUGUCA | 341 | 1673-1691 |
| AD-72551 | A-145115 | UGGGGGGCAGGGGUGCGCC | 160 | 1684-1702 | A-145116 | GGCGCACCCCUGCCCCCCA | 342 | 1684-1702 |
| AD-72552 | A-145117 | GGUGCGCCUCCUCUGCCCU | 161 | 1695-1713 | A-145118 | AGGGCAGAGGAGGCGCACC | 343 | 1695-1713 |
| AD-72553 | A-145119 | UCUGCCCUGCCCACCAGCC | 162 | 1706-1724 | A-145120 | GGCUGGUGGGCAGGGCAGA | 344 | 1706-1724 |
| AD-72554 | A-145121 | ACCAGCCUGUGAUUUGAUG | 163 | 1718-1736 | A-145122 | CAUCAAAUCACAGGCUGGU | 345 | 1718-1736 |
| AD-72555 | A-145123 | UGAUUUGAUGGGGUCUUCA | 164 | 1727-1745 | A-145124 | UGAAGACCCCAUCAAAUCA | 346 | 1727-1745 |
| AD-72556 | A-145125 | GUCUUCAUUGUCCAGAAAU | 165 | 1739-1757 | A-145126 | AUUUCUGGACAAUGAAGAC | 347 | 1739-1757 |
| AD-72557 | A-145127 | UCCAGAAAUACCUCCUCCC | 166 | 1749-1767 | A-145128 | GGGAGGAGGUAUUUCUGGA | 348 | 1749-1767 |
| AD-72558 | A-145129 | UCCUCCCGCUGACUGCCCC | 167 | 1761-1779 | A-145130 | GGGGCAGUCAGCGGGAGGA | 349 | 1761-1779 |
| AD-72559 | A-145131 | ACUGCCCCAGAGCCUGAAA | 168 | 1772-1790 | A-145132 | UUUCAGGCUCUGGGGCAGU | 350 | 1772-1790 |
| AD-72560 | A-145133 | AGCCUGAAAGUCUCACCCU | 169 | 1782-1800 | A-145134 | AGGGUGAGACUUUCAGGCU | 351 | 1782-1800 |
| AD-72561 | A-145135 | UCACCCUUGGAGCCCACCU | 170 | 1794-1812 | A-145136 | AGGUGGGCUCCAAGGGUGA | 352 | 1794-1812 |
| AD-72562 | A-145137 | CCCACCUUGGAAUUAAGGG | 171 | 1806-1824 | A-145138 | CCCUUAAUUCCAAGGUGGG | 353 | 1806-1824 |
| AD-72563 | A-145139 | GAAUUAAGGGCGUGCCUCA | 172 | 1815-1833 | A-145140 | UGAGGCACGCCCUUAAUUC | 354 | 1815-1833 |
| AD-72564 | A-145141 | UGCCUCAGCCACAAAUGUG | 173 | 1827-1845 | A-145142 | CACAUUUGUGGCUGAGGCA | 355 | 1827-1845 |
| AD-72565 | A-145143 | ACAAAUGUGACCCAGGAUA | 174 | 1837-1855 | A-145144 | UAUCCUGGGUCACAUUUGU | 356 | 1837-1855 |
| AD-72566 | A-145145 | CAGGAUACAGAGUGUUGCU | 175 | 1849-1867 | A-145146 | AGCAACACUCUGUAUCCUG | 357 | 1849-1867 |
| AD-72567 | A-145147 | AGUGUUGCUGUCCUCAGGG | 176 | 1859-1877 | A-145148 | CCCUGAGGACAGCAACACU | 358 | 1859-1877 |
| AD-72568 | A-145149 | CCUCAGGGAGGUCCGAUCU | 177 | 1870-1888 | A-145150 | AGAUCGGACCUCCCUGAGG | 359 | 1870-1888 |
| AD-72569 | A-145151 | UCCGAUCUGGAACACAUAU | 178 | 1881-1899 | A-145152 | AUAUGUGUUCCAGAUCGGA | 360 | 1881-1899 |
| AD-72570 | A-145153 | ACACAUAUUGGAAUUGGGG | 179 | 1892-1910 | A-145154 | CCCCAAUUCCAAUAUGUGU | 361 | 1892-1910 |
| AD-72571 | A-145155 | UUGGGGCCAACUCCAAUAU | 180 | 1905-1923 | A-145156 | AUAUUGGAGUUGGCCCCAA | 362 | 1905-1923 |
| AD-72572 | A-145157 | ACUCCAAUAUAGGGUGGGU | 181 | 1914-1932 | A-145158 | ACCCACCCUAUAUUGGAGU | 363 | 1914-1932 |
| AD-72573 | A-145159 | GUGGGUAAGGCCUUAUAAU | 182 | 1927-1945 | A-145160 | AUUAUAAGGCCUUACCCAC | 364 | 1927-1945 |
| AD-72574 | A-145161 | CCUUAUAAUGUAAAGAGCA | 183 | 1937-1955 | A-145162 | UGCUCUUUACAUUAUAAGG | 365 | 1937-1955 |
| AD-72575 | A-145163 | AAGAGCAUAUAAUGUAAAG | 184 | 1949-1967 | A-145164 | CUUUACAUUAUAUGCUCUU | 366 | 1949-1967 |
| AD-72576 | A-145165 | UAAUGUAAAGGGCUUUAGA | 185 | 1958-1976 | A-145166 | UCUAAAGCCCUUUACAUUA | 367 | 1958-1976 |
| AD-72577 | A-145167 | UUUAGAGUGAGACAGACCU | 186 | 1971-1989 | A-145168 | AGGUCUGUCUCACUCUAAA | 368 | 1971-1989 |
| AD-72578 | A-145169 | ACAGACCUGGAUUAAAAUC | 187 | 1982-2000 | A-145170 | GAUUUUAAUCCAGGUCUGU | 369 | 1982-2000 |
| AD-72579 | A-145171 | UUAAAAUCUGCCAUUUAAU | 188 | 1993-2011 | A-145172 | AUUAAAUGGCAGAUUUUAA | 370 | 1993-2011 |
| AD-72580 | A-145173 | CAUUUAAUUAGCUGCAUAU | 189 | 2004-2022 | A-145174 | AUAUGCAGCUAAUUAAAUG | 371 | 2004-2022 |
| AD-72581 | A-145177 | CUUAGGGUACAGCACUUAA | 190 | 2026-2044 | A-145178 | UUAAGUGCUGUACCCUAAG | 372 | 2026-2044 |
| AD-72582 | A-145179 | CAGCACUUAACGCAAUCUG | 191 | 2035-2053 | A-145180 | CAGAUUGCGUUAAGUGCUG | 373 | 2035-2053 |
| AD-72583 | A-145181 | GCAAUCUGCCUCAAUUUCU | 192 | 2046-2064 | A-145182 | AGAAAUUGAGGCAGAUUGC | 374 | 2046-2064 |
| AD-72584 | A-145183 | AAUUUCUUCAUCUGUCAAA | 193 | 2058-2076 | A-145184 | UUUGACAGAUGAAGAAAUU | 375 | 2058-2076 |
| AD-72590 | A-145187 | GAACCAAUUCUGCUUGGCU | 194 | 2079-2097 | A-145188 | AGCCAAGCAGAAUUGGUUC | 376 | 2079-2097 |
| AD-72591 | A-145189 | UUGGCUACAGAAUUAUUGU | 195 | 2092-2110 | A-145190 | ACAAUAAUUCUGUAGCCAA | 377 | 2092-2110 |
| AD-72592 | A-145191 | AUUAUUGUGAGGAUAAAAU | 196 | 2103-2121 | A-145192 | AUUUUAUCCUCACAAUAAU | 378 | 2103-2121 |
| AD-72593 | A-145193 | AGGAUAAAAUCAUAUAUAA | 197 | 2112-2130 | A-145194 | UUAUAUAUGAUUUUAUCCU | 379 | 2112-2130 |
| AD-72594 | A-145195 | UAUAUAAAAUGCCCAGCAU | 198 | 2124-2142 | A-145196 | AUGCUGGGCAUUUUAUAUA | 380 | 2124-2142 |

TABLE 4
KHK Single Dose Screen in Hep3B
Data are expressed as percent message remaining
relative to AD-1955 non-targeting control

| Duplex ID | 10 nM AVG | 10 nM SD | Range |
|---|---|---|---|
| AD-72250 | 94.30 | 16.80 | 13-31 |
| AD-72251 | 75.82 | 25.36 | 23-41 |
| AD-72252 | 68.85 | 8.30 | 34-52 |
| AD-72253 | 62.42 | 20.81 | 44-62 |
| AD-72254 | 55.80 | 19.86 | 56-74 |
| AD-72255 | 52.78 | 18.60 | 68-86 |
| AD-72256 | 66.12 | 24.48 | 77-95 |
| AD-72257 | 33.16 | 13.92 | 89-107 |
| AD-72258 | 90.29 | 26.86 | 99-117 |
| AD-72259 | 117.30 | 21.51 | 111-129 |
| AD-72260 | 125.66 | 49.57 | 122-140 |
| AD-72261 | 91.29 | 39.54 | 145-163 |
| AD-72262 | 61.75 | 15.29 | 156-174 |
| AD-72263 | 58.14 | 22.74 | 166-184 |
| AD-72264 | 40.11 | 11.92 | 176-194 |
| AD-72265 | 83.05 | 19.86 | 189-207 |
| AD-72266 | 91.87 | 34.68 | 199-217 |
| AD-72267 | 106.26 | 16.23 | 211-229 |
| AD-72268 | 96.90 | 20.89 | 222-240 |
| AD-72269 | 78.58 | 16.73 | 233-251 |
| AD-72270 | 130.44 | 33.41 | 244-262 |
| AD-72271 | 80.59 | 19.99 | 255-273 |
| AD-72272 | 44.06 | 22.56 | 264-282 |
| AD-72273 | 109.26 | 37.17 | 275-293 |
| AD-72274 | 117.78 | 17.41 | 286-304 |
| AD-72275 | 100.90 | 18.81 | 299-317 |
| AD-72276 | 132.55 | 40.22 | 310-328 |
| AD-72277 | 76.26 | 23.91 | 319-337 |
| AD-72278 | 120.43 | 29.66 | 341-359 |
| AD-72279 | 55.06 | 26.33 | 352-370 |
| AD-72280 | 105.22 | 15.92 | 364-382 |
| AD-72281 | 103.75 | 11.62 | 376-394 |
| AD-72282 | 99.25 | 17.09 | 386-404 |
| AD-72283 | 88.63 | 21.23 | 398-416 |
| AD-72284 | 102.01 | 15.30 | 409-427 |
| AD-72285 | 90.62 | 21.65 | 419-437 |
| AD-72286 | 100.16 | 14.03 | 431-449 |
| AD-72287 | 56.78 | 3.45 | 441-459 |
| AD-72288 | 87.30 | 18.82 | 453-471 |
| AD-72289 | 110.55 | 17.40 | 463-481 |
| AD-72290 | 40.35 | 9.04 | 474-492 |
| AD-72291 | 77.68 | 8.34 | 486-504 |
| AD-72292 | 104.78 | 22.36 | 495-513 |
| AD-72293 | 39.06 | 7.41 | 508-526 |
| AD-72294 | 85.87 | 10.80 | 519-537 |
| AD-72295 | 33.96 | 7.27 | 529-547 |
| AD-72296 | 96.53 | 21.78 | 541-559 |
| AD-72297 | 100.84 | 27.67 | 552-570 |
| AD-72298 | 44.37 | 8.01 | 562-580 |
| AD-72299 | 59.40 | 15.10 | 573-591 |
| AD-72300 | 81.29 | 11.12 | 583-601 |
| AD-72301 | 104.74 | 25.20 | 594-612 |
| AD-72302 | 60.08 | 2.58 | 605-623 |
| AD-72303 | 29.22 | 5.19 | 616-634 |
| AD-72304 | 32.08 | 8.14 | 628-646 |
| AD-72305 | 65.71 | 21.88 | 639-657 |
| AD-72306 | 77.49 | 18.16 | 649-667 |
| AD-72307 | 109.94 | 17.59 | 661-679 |
| AD-72308 | 55.01 | 7.88 | 672-690 |
| AD-72309 | 47.80 | 8.17 | 682-700 |
| AD-72310 | 66.01 | 13.17 | 694-712 |
| AD-72311 | 35.44 | 5.89 | 705-723 |
| AD-72312 | 56.48 | 8.52 | 726-744 |
| AD-72313 | 48.74 | 14.39 | 739-757 |
| AD-72314 | 60.81 | 15.77 | 750-768 |
| AD-72315 | 41.93 | 6.20 | 760-778 |
| AD-72316 | 49.25 | 12.18 | 771-789 |
| AD-72317 | 49.74 | 13.54 | 781-799 |
| AD-72318 | 83.39 | 7.50 | 793-811 |
| AD-72319 | 25.46 | 2.59 | 804-822 |
| AD-72320 | 84.90 | 20.01 | 816-834 |
| AD-72321 | 63.72 | 20.06 | 825-843 |
| AD-72322 | 40.03 | 7.16 | 837-855 |
| AD-72323 | 65.00 | 4.11 | 849-867 |
| AD-72324 | 77.03 | 14.56 | 860-878 |
| AD-72325 | 58.38 | 8.54 | 870-888 |
| AD-72326 | 60.72 | 7.58 | 882-900 |
| AD-72327 | 46.52 | 16.36 | 892-910 |
| AD-72328 | 69.89 | 6.20 | 914-932 |
| AD-72329 | 87.57 | 17.58 | 926-944 |
| AD-72330 | 52.91 | 7.57 | 937-955 |
| AD-72331 | 87.15 | 8.65 | 946-964 |
| AD-72332 | 34.22 | 11.41 | 959-977 |
| AD-72333 | 56.06 | 15.55 | 970-988 |
| AD-72334 | 92.79 | 19.23 | 980-998 |
| AD-72335 | 49.64 | 12.66 | 992-1010 |
| AD-72336 | 72.76 | 24.19 | 1003-1021 |
| AD-72337 | 44.07 | 9.09 | 1013-1031 |
| AD-72338 | 40.67 | 9.91 | 1023-1041 |
| AD-72339 | 68.84 | 13.54 | 1035-1053 |
| AD-72498 | 89.12 | 19.36 | 1047-1065 |
| AD-72499 | 29.04 | 8.75 | 1069-1087 |
| AD-72500 | 29.75 | 16.22 | 1080-1098 |
| AD-72501 | 36.97 | 13.21 | 1090-1108 |
| AD-72502 | 27.57 | 11.60 | 1111-1129 |
| AD-72503 | 45.60 | 7.81 | 1122-1140 |
| AD-72504 | 77.11 | 17.10 | 1135-1153 |
| AD-72505 | 78.01 | 2.91 | 1145-1163 |
| AD-72506 | 24.58 | 4.99 | 1155-1173 |
| AD-72507 | 35.39 | 4.85 | 1166-1184 |
| AD-72508 | 37.27 | 2.49 | 1178-1196 |
| AD-72509 | 51.05 | 15.67 | 1188-1206 |
| AD-72510 | 91.60 | 32.85 | 1201-1219 |
| AD-72511 | 69.19 | 17.33 | 1212-1230 |
| AD-72512 | 31.86 | 7.21 | 1221-1239 |
| AD-72513 | 28.70 | 6.98 | 1234-1252 |
| AD-72514 | 32.78 | 9.58 | 1243-1261 |
| AD-72515 | 50.05 | 11.73 | 1254-1272 |
| AD-72516 | 51.22 | 10.85 | 1266-1284 |
| AD-72517 | 49.12 | 6.15 | 1276-1294 |
| AD-72518 | 67.90 | 12.78 | 1288-1306 |
| AD-72519 | 59.04 | 17.32 | 1300-1318 |
| AD-72520 | 72.96 | 32.80 | 1309-1327 |
| AD-72521 | 46.81 | 8.84 | 1320-1338 |
| AD-72522 | 31.78 | 14.81 | 1332-1350 |
| AD-72523 | 72.17 | 5.70 | 1343-1361 |
| AD-72524 | 76.18 | 23.61 | 1354-1372 |
| AD-72525 | 91.94 | 29.44 | 1364-1382 |
| AD-72526 | 79.86 | 21.67 | 1375-1393 |
| AD-72527 | 59.88 | 21.52 | 1388-1406 |
| AD-72528 | 91.91 | 14.45 | 1397-1415 |
| AD-72529 | 66.07 | 8.24 | 1408-1426 |
| AD-72530 | 78.63 | 10.38 | 1442-1460 |
| AD-72531 | 102.17 | 14.26 | 1454-1472 |
| AD-72532 | 102.14 | 14.06 | 1465-1483 |
| AD-72533 | 75.21 | 22.35 | 1474-1492 |
| AD-72534 | 93.37 | 36.21 | 1486-1504 |
| AD-72535 | 107.76 | 15.58 | 1496-1514 |
| AD-72536 | 87.72 | 14.74 | 1507-1525 |
| AD-72537 | 104.07 | 22.46 | 1520-1538 |
| AD-72538 | 102.86 | 18.44 | 1530-1548 |
| AD-72539 | 85.81 | 8.99 | 1540-1558 |
| AD-72540 | 81.34 | 18.04 | 1564-1582 |
| AD-72541 | 97.44 | 19.13 | 1574-1592 |
| AD-72542 | 95.88 | 10.07 | 1584-1602 |
| AD-72543 | 117.02 | 26.69 | 1597-1615 |
| AD-72544 | 81.45 | 56.89 | 1608-1626 |
| AD-72545 | 77.35 | 7.88 | 1618-1636 |
| AD-72546 | 107.55 | 11.98 | 1629-1647 |
| AD-72547 | 77.98 | 5.37 | 1640-1658 |
| AD-72548 | 63.79 | 21.20 | 1650-1668 |
| AD-72549 | 101.19 | 4.19 | 1663-1681 |
| AD-72550 | 106.89 | 12.57 | 1673-1691 |
| AD-72551 | 88.46 | 5.34 | 1684-1702 |
| AD-72552 | 111.87 | 11.75 | 1695-1713 |
| AD-72553 | 136.07 | 28.97 | 1706-1724 |
| AD-72554 | 122.41 | 4.39 | 1718-1736 |
| AD-72555 | 77.55 | 21.53 | 1727-1745 |
| AD-72556 | 73.87 | 38.83 | 1739-1757 |
| AD-72557 | 93.39 | 9.13 | 1749-1767 |
| AD-72558 | 107.67 | 18.87 | 1761-1779 |
| AD-72559 | 88.92 | 7.98 | 1772-1790 |
| AD-72560 | 95.18 | 6.86 | 1782-1800 |
| AD-72561 | 87.30 | 18.93 | 1794-1812 |
| AD-72562 | 95.70 | 7.13 | 1806-1824 |
| AD-72563 | 93.46 | 9.82 | 1815-1833 |
| AD-72564 | 117.28 | 27.22 | 1827-1845 |
| AD-72565 | 63.45 | 22.28 | 1837-1855 |
| AD-72566 | 102.19 | 40.02 | 1849-1867 |
| AD-72567 | 66.73 | 28.77 | 1859-1877 |
| AD-72568 | 105.83 | 32.44 | 1870-1888 |
| AD-72569 | 99.51 | 17.09 | 1881-1899 |
| AD-72570 | 110.18 | 25.33 | 1892-1910 |
| AD-72571 | 96.82 | 17.18 | 1905-1923 |
| AD-72572 | 71.24 | 22.70 | 1914-1932 |
| AD-72573 | 102.94 | 14.30 | 1927-1945 |
| AD-72574 | 91.16 | 39.27 | 1937-1955 |
| AD-72575 | 90.54 | 24.48 | 1949-1967 |
| AD-72576 | 99.62 | 16.22 | 1958-1976 |
| AD-72577 | 97.43 | 21.17 | 1971-1989 |
| AD-72578 | 96.51 | 28.91 | 1982-2000 |
| AD-72579 | 113.62 | 31.85 | 1993-2011 |
| AD-72580 | 74.56 | 9.76 | 2004-2022 |
| AD-72581 | 94.40 | 14.63 | 2026-2044 |
| AD-72582 | 71.79 | 18.70 | 2035-2053 |
| AD-72583 | 85.71 | 17.88 | 2046-2064 |
| AD-72584 | 113.53 | 44.49 | 2058-2076 |
| AD-72590 | 86.23 | 8.29 | 2079-2097 |
| AD-72591 | 101.14 | 18.17 | 2092-2110 |
| AD-72592 | 94.39 | 16.72 | 2103-2121 |
| AD-72593 | 87.27 | 14.27 | 2112-2130 |
| AD-72594 | 84.50 | 30.12 | 2124-2142 |

TABLE 5
KHK Modified Sequences

| | Sense | | SEQ | Antisense | | SEQ | | SEQ |
|---|---|---|---|---|---|---|---|---|
| Duplex | Oligo | | ID | Oligo | | ID | | ID |
| Name | Name | Sense Sequence | NO | Name | Antisense sequence | NO | mRNA target sequence | NO |
| AD-72250 | A-144811 | AGGCAGGGCUGCAGAUGCGdTdT | 381 | A-144812 | CGCAUCUGCAGCCCUGCCUdTdT | 563 | AGGCAGGGCUGCAGAUGCG | 745 |
| AD-72251 | A-144813 | GCAGAUGCGAGGCCCAGCUdTdT | 382 | A-144814 | AGCUGGGCCUCGCAUCUGCdTdT | 564 | GCAGAUGCGAGGCCCAGCU | 746 |
| AD-72252 | A-144815 | GCCCAGCUGUACCUCGCGUdTdT | 383 | A-144816 | ACGCGAGGUACAGCUGGGCdTdT | 565 | GCCCAGCUGUACCUCGCGU | 747 |
| AD-72253 | A-144817 | ACCUCGCGUGUCCCGGGUCdTdT | 384 | A-144818 | GACCCGGGACACGCGAGGUdTdT | 566 | ACCUCGCGUGUCCCGGGUC | 748 |
| AD-72254 | A-144819 | CCGGGUCGGGAGUCGGAGAdTdT | 385 | A-144820 | UCUCCGACUCCCGACCCGGdTdT | 567 | CCGGGUCGGGAGUCGGAGA | 749 |
| AD-72255 | A-144821 | UCGGAGACGCAGGUGCAGGdTdT | 386 | A-144822 | CCUGCACCUGCGUCUCCGAdTdT | 568 | UCGGAGACGCAGGUGCAGG | 750 |
| AD-72256 | A-144823 | CAGGUGCAGGAGAGUGCGGdTdT | 387 | A-144824 | CCGCACUCUCCUGCACCUGdTdT | 569 | CAGGUGCAGGAGAGUGCGG | 751 |
| AD-72257 | A-144825 | AGUGCGGGGCAAGUAGCGCdTdT | 388 | A-144826 | GCGCUACUUGCCCCGCACUdTdT | 570 | AGUGCGGGGCAAGUAGCGC | 752 |
| AD-72258 | A-144827 | AAGUAGCGCAUUUUCUCUUdTdT | 389 | A-144828 | AAGAGAAAAUGCGCUACUUdTdT | 571 | AAGUAGCGCAUUUUCUCUU | 753 |
| AD-72259 | A-144829 | UUCUCUUUGCAUUCUCGAGdTdT | 390 | A-144830 | CUCGAGAAUGCAAAGAGAAdTdT | 572 | UUCUCUUUGCAUUCUCGAG | 754 |
| AD-72260 | A-144831 | UUCUCGAGAUCGCUUAGCCdTdT | 391 | A-144832 | GGCUAAGCGAUCUCGAGAAdTdT | 573 | UUCUCGAGAUCGCUUAGCC | 755 |
| AD-72261 | A-144835 | UUUAAAAAGGUUUGCAUCAdTdT | 392 | A-144836 | UGAUGCAAACCUUUUUAAAdTdT | 574 | UUUAAAAAGGUUUGCAUCA | 756 |
| AD-72262 | A-144837 | UUGCAUCAGCUGUGAGUCCdTdT | 393 | A-144838 | GGACUCACAGCUGAUGCAAdTdT | 575 | UUGCAUCAGCUGUGAGUCC | 757 |
| AD-72263 | A-144839 | UGUGAGUCCAUCUGACAAGdTdT | 394 | A-144840 | CUUGUCAGAUGGACUCACAdTdT | 576 | UGUGAGUCCAUCUGACAAG | 758 |
| AD-72264 | A-144841 | UCUGACAAGCGAGGAAACUdTdT | 395 | A-144842 | AGUUUCCUCGCUUGUCAGAdTdT | 577 | UCUGACAAGCGAGGAAACU | 759 |
| AD-72265 | A-144843 | GAAACUAAGGCUGAGAAGUdTdT | 396 | A-144844 | ACUUCUCAGCCUUAGUUUCdTdT | 578 | GAAACUAAGGCUGAGAAGU | 760 |
| AD-72266 | A-144845 | CUGAGAAGUGGGAGGCGUUdTdT | 397 | A-144846 | AACGCCUCCCACUUCUCAGdTdT | 579 | CUGAGAAGUGGGAGGCGUU | 761 |
| AD-72267 | A-144847 | AGGCGUUGCCAUCUGCAGGdTdT | 398 | A-144848 | CCUGCAGAUGGCAACGCCUdTdT | 580 | AGGCGUUGCCAUCUGCAGG | 762 |
| AD-72268 | A-144849 | UCUGCAGGCCCAGGCAACCdTdT | 399 | A-144850 | GGUUGCCUGGGCCUGCAGAdTdT | 581 | UCUGCAGGCCCAGGCAACC | 763 |
| AD-72269 | A-144851 | AGGCAACCUGCUACGGGAAdTdT | 400 | A-144852 | UUCCCGUAGCAGGUUGCCUdTdT | 582 | AGGCAACCUGCUACGGGAA | 764 |
| AD-72270 | A-144853 | UACGGGAAGACCGGGGACCdTdT | 401 | A-144854 | GGUCCCCGGUCUUCCCGUAdTdT | 583 | UACGGGAAGACCGGGGACC | 765 |
| AD-72271 | A-144855 | CGGGGACCAAGACCUCUGGdTdT | 402 | A-144856 | CCAGAGGUCUUGGUCCCCGdTdT | 584 | CGGGGACCAAGACCUCUGG | 766 |
| AD-72272 | A-144857 | AGACCUCUGGGUUGGCUUUdTdT | 403 | A-144858 | AAAGCCAACCCAGAGGUCUdTdT | 585 | AGACCUCUGGGUUGGCUUU | 767 |
| AD-72273 | A-144859 | UUGGCUUUCCUAGACCCGCdTdT | 404 | A-144860 | GCGGGUCUAGGAAAGCCAAdTdT | 586 | UUGGCUUUCCUAGACCCGC | 768 |
| AD-72274 | A-144861 | AGACCCGCUCGGGUCUUCGdTdT | 405 | A-144862 | CGAAGACCCGAGCGGGUCUdTdT | 587 | AGACCCGCUCGGGUCUUCG | 769 |
| AD-72275 | A-144863 | UCUUCGGGUGUCGCGAGGAdTdT | 406 | A-144864 | UCCUCGCGACACCCGAAGAdTdT | 588 | UCUUCGGGUGUCGCGAGGA | 770 |
| AD-72276 | A-144865 | CGCGAGGAAGGGCCCUGCUdTdT | 407 | A-144866 | AGCAGGGCCCUUCCUCGCGdTdT | 589 | CGCGAGGAAGGGCCCUGCU | 771 |
| AD-72277 | A-144867 | GGGCCCUGCUCCUUUCGUUdTdT | 408 | A-144868 | AACGAAAGGAGCAGGGCCCdTdT | 590 | GGGCCCUGCUCCUUUCGUU | 772 |
| AD-72278 | A-144871 | UGCACCCCUGGCCGCUGCAdTdT | 409 | A-144872 | UGCAGCGGCCAGGGGUGCAdTdT | 591 | UGCACCCCUGGCCGCUGCA | 773 |
| AD-72279 | A-144873 | CCGCUGCAGGUGGCUCCCUdTdT | 410 | A-144874 | AGGGAGCCACCUGCAGCGGdTdT | 592 | CCGCUGCAGGUGGCUCCCU | 774 |
| AD-72280 | A-144875 | GCUCCCUGGAGGAGGAGCUdTdT | 411 | A-144876 | AGCUCCUCCUCCAGGGAGCdTdT | 593 | GCUCCCUGGAGGAGGAGCU | 775 |
| AD-72281 | A-144877 | AGGAGCUCCCACGCGGAGGdTdT | 412 | A-144878 | CCUCCGCGUGGGAGCUCCUdTdT | 594 | AGGAGCUCCCACGCGGAGG | 776 |
| AD-72282 | A-144879 | ACGCGGAGGAGGAGCCAGGdTdT | 413 | A-144880 | CCUGGCUCCUCCUCCGCGUdTdT | 595 | ACGCGGAGGAGGAGCCAGG | 777 |
| AD-72283 | A-144881 | AGCCAGGGCAGCUGGGAGCdTdT | 414 | A-144882 | GCUCCCAGCUGCCCUGGCUdTdT | 596 | AGCCAGGGCAGCUGGGAGC | 778 |
| AD-72284 | A-144883 | CUGGGAGCGGGGACACCAUdTdT | 415 | A-144884 | AUGGUGUCCCCGCUCCCAGdTdT | 597 | CUGGGAGCGGGGACACCAU | 779 |
| AD-72285 | A-144885 | GGACACCAUCCUCCUGGAUdTdT | 416 | A-144886 | AUCCAGGAGGAUGGUGUCCdTdT | 598 | GGACACCAUCCUCCUGGAU | 780 |
| AD-72286 | A-144887 | CCUGGAUAAGAGGCAGAGGdTdT | 417 | A-144888 | CCUCUGCCUCUUAUCCAGGdTdT | 599 | CCUGGAUAAGAGGCAGAGG | 781 |
| AD-72287 | A-144889 | AGGCAGAGGCCGGGAGGAAdTdT | 418 | A-144890 | UUCCUCCCGGCCUCUGCCUdTdT | 600 | AGGCAGAGGCCGGGAGGAA | 782 |
| AD-72288 | A-144891 | GGAGGAACCCCGUCAGCCGdTdT | 419 | A-144892 | CGGCUGACGGGGUUCCUCCdTdT | 601 | GGAGGAACCCCGUCAGCCG | 783 |
| AD-72289 | A-144893 | CGUCAGCCGGGCGGGCAGGdTdT | 420 | A-144894 | CCUGCCCGCCCGGCUGACGdTdT | 602 | CGUCAGCCGGGCGGGCAGG | 784 |
| AD-72290 | A-144895 | CGGGCAGGAAGCUCUGGGAdTdT | 421 | A-144896 | UCCCAGAGCUUCCUGCCCGdTdT | 603 | CGGGCAGGAAGCUCUGGGA | 785 |
| AD-72291 | A-144897 | UCUGGGAGUAGCCUCAUGGdTdT | 422 | A-144898 | CCAUGAGGCUACUCCCAGAdTdT | 604 | UCUGGGAGUAGCCUCAUGG | 786 |
| AD-72292 | A-144899 | AGCCUCAUGGAAGAGAAGCdTdT | 423 | A-144900 | GCUUCUCUUCCAUGAGGCUdTdT | 605 | AGCCUCAUGGAAGAGAAGC | 787 |
| AD-72293 | A-144901 | AGAAGCAGAUCCUGUGCGUdTdT | 424 | A-144902 | ACGCACAGGAUCUGCUUCUdTdT | 606 | AGAAGCAGAUCCUGUGCGU | 788 |
| AD-72294 | A-144903 | CUGUGCGUGGGGCUAGUGGdTdT | 425 | A-144904 | CCACUAGCCCCACGCACAGdTdT | 607 | CUGUGCGUGGGGCUAGUGG | 789 |
| AD-72295 | A-144905 | GGCUAGUGGUGCUGGACGUdTdT | 426 | A-144906 | ACGUCCAGCACCACUAGCCdTdT | 608 | GGCUAGUGGUGCUGGACGU | 790 |
| AD-72296 | A-144907 | UGGACGUCAUCAGCCUGGUdTdT | 427 | A-144908 | ACCAGGCUGAUGACGUCCAdTdT | 609 | UGGACGUCAUCAGCCUGGU | 791 |
| AD-72297 | A-144909 | AGCCUGGUGGACAAGUACCdTdT | 428 | A-144910 | GGUACUUGUCCACCAGGCUdTdT | 610 | AGCCUGGUGGACAAGUACC | 792 |
| AD-72298 | A-144911 | ACAAGUACCCUAAGGAGGAdTdT | 429 | A-144912 | UCCUCCUUAGGGUACUUGUdTdT | 611 | ACAAGUACCCUAAGGAGGA | 793 |
| AD-72299 | A-144913 | AAGGAGGACUCGGAGAUAAdTdT | 430 | A-144914 | UUAUCUCCGAGUCCUCCUUdTdT | 612 | AAGGAGGACUCGGAGAUAA | 794 |
| AD-72300 | A-144915 | CGGAGAUAAGGAGCCUGCCdTdT | 431 | A-144916 | GGCAGGCUCCUUAUCUCCGdTdT | 613 | CGGAGAUAAGGAGCCUGCC | 795 |
| AD-72301 | A-144917 | AGCCUGCCAGAUGUGUCUGdTdT | 432 | A-144918 | CAGACACAUCUGGCAGGCUdTdT | 614 | AGCCUGCCAGAUGUGUCUG | 796 |
| AD-72302 | A-144919 | UGUGUCUGCUACAGACUUUdTdT | 433 | A-144920 | AAAGUCUGUAGCAGACACAdTdT | 615 | UGUGUCUGCUACAGACUUU | 797 |
| AD-72303 | A-144921 | CAGACUUUGAGAAGGUUGAdTdT | 434 | A-144922 | UCAACCUUCUCAAAGUCUGdTdT | 616 | CAGACUUUGAGAAGGUUGA | 798 |
| AD-72304 | A-144923 | AGGUUGAUCUGACCCAGUUdTdT | 435 | A-144924 | AACUGGGUCAGAUCAACCUdTdT | 617 | AGGUUGAUCUGACCCAGUU | 799 |
| AD-72305 | A-144925 | ACCCAGUUCAAGUGGAUCCdTdT | 436 | A-144926 | GGAUCCACUUGAACUGGGUdTdT | 618 | ACCCAGUUCAAGUGGAUCC | 800 |
| AD-72306 | A-144927 | AGUGGAUCCACAUUGAGGGdTdT | 437 | A-144928 | CCCUCAAUGUGGAUCCACUdTdT | 619 | AGUGGAUCCACAUUGAGGG | 801 |
| AD-72307 | A-144929 | UUGAGGGCCGGAACGCAUCdTdT | 438 | A-144930 | GAUGCGUUCCGGCCCUCAAdTdT | 620 | UUGAGGGCCGGAACGCAUC | 802 |
| AD-72308 | A-144931 | AACGCAUCGGAGCAGGUGAdTdT | 439 | A-144932 | UCACCUGCUCCGAUGCGUUdTdT | 621 | AACGCAUCGGAGCAGGUGA | 803 |
| AD-72309 | A-144933 | AGCAGGUGAAGAUGCUGCAdTdT | 440 | A-144934 | UGCAGCAUCUUCACCUGCUdTdT | 622 | AGCAGGUGAAGAUGCUGCA | 804 |
| AD-72310 | A-144935 | UGCUGCAGCGGAUAGACGCdTdT | 441 | A-144936 | GCGUCUAUCCGCUGCAGCAdTdT | 623 | UGCUGCAGCGGAUAGACGC | 805 |
| AD-72311 | A-144937 | AUAGACGCACACAACACCAdTdT | 442 | A-144938 | UGGUGUUGUGUGCGUCUAUdTdT | 624 | AUAGACGCACACAACACCA | 806 |
| AD-72312 | A-144941 | CAGCCUCCAGAGCAGAAGAdTdT | 443 | A-144942 | UCUUCUGCUCUGGAGGCUGdTdT | 625 | CAGCCUCCAGAGCAGAAGA | 807 |
| AD-72313 | A-144943 | AGAAGAUCCGGGUGUCCGUdTdT | 444 | A-144944 | ACGGACACCCGGAUCUUCUdTdT | 626 | AGAAGAUCCGGGUGUCCGU | 808 |
| AD-72314 | A-144945 | GUGUCCGUGGAGGUGGAGAdTdT | 445 | A-144946 | UCUCCACCUCCACGGACACdTdT | 627 | GUGUCCGUGGAGGUGGAGA | 809 |
| AD-72315 | A-144947 | AGGUGGAGAAGCCACGAGAdTdT | 446 | A-144948 | UCUCGUGGCUUCUCCACCUdTdT | 628 | AGGUGGAGAAGCCACGAGA | 810 |
| AD-72316 | A-144949 | CCACGAGAGGAGCUCUUCCdTdT | 447 | A-144950 | GGAAGAGCUCCUCUCGUGGdTdT | 629 | CCACGAGAGGAGCUCUUCC | 811 |
| AD-72317 | A-144951 | AGCUCUUCCAGCUGUUUGGdTdT | 448 | A-144952 | CCAAACAGCUGGAAGAGCUdTdT | 630 | AGCUCUUCCAGCUGUUUGG | 812 |
| AD-72318 | A-144953 | UGUUUGGCUACGGAGACGUdTdT | 449 | A-144954 | ACGUCUCCGUAGCCAAACAdTdT | 631 | UGUUUGGCUACGGAGACGU | 813 |
| AD-72319 | A-144955 | GGAGACGUGGUGUUUGUCAdTdT | 450 | A-144956 | UGACAAACACCACGUCUCCdTdT | 632 | GGAGACGUGGUGUUUGUCA | 814 |
| AD-72320 | A-144957 | UUUGUCAGCAAAGAUGUGGdTdT | 451 | A-144958 | CCACAUCUUUGCUGACAAAdTdT | 633 | UUUGUCAGCAAAGAUGUGG | 815 |
| AD-72321 | A-144959 | AAAGAUGUGGCCAAGCACUdTdT | 452 | A-144960 | AGUGCUUGGCCACAUCUUUdTdT | 634 | AAAGAUGUGGCCAAGCACU | 816 |
| AD-72322 | A-144961 | AAGCACUUGGGGUUCCAGUdTdT | 453 | A-144962 | ACUGGAACCCCAAGUGCUUdTdT | 635 | AAGCACUUGGGGUUCCAGU | 817 |
| AD-72323 | A-144963 | UUCCAGUCAGCAGAGGAAGdTdT | 454 | A-144964 | CUUCCUCUGCUGACUGGAAdTdT | 636 | UUCCAGUCAGCAGAGGAAG | 818 |
| AD-72324 | A-144965 | AGAGGAAGCCUUGAGGGGCdTdT | 455 | A-144966 | GCCCCUCAAGGCUUCCUCUdTdT | 637 | AGAGGAAGCCUUGAGGGGC | 819 |
| AD-72325 | A-144967 | UUGAGGGGCUUGUAUGGUCdTdT | 456 | A-144968 | GACCAUACAAGCCCCUCAAdTdT | 638 | UUGAGGGGCUUGUAUGGUC | 820 |
| AD-72326 | A-144969 | UAUGGUCGUGUGAGGAAAGdTdT | 457 | A-144970 | CUUUCCUCACACGACCAUAdTdT | 639 | UAUGGUCGUGUGAGGAAAG | 821 |
| AD-72327 | A-144971 | UGAGGAAAGGGGCUGUGCUdTdT | 458 | A-144972 | AGCACAGCCCCUUUCCUCAdTdT | 640 | UGAGGAAAGGGGCUGUGCU | 822 |
| AD-72328 | A-144975 | CUGUGCCUGGGCUGAGGAGdTdT | 459 | A-144976 | CUCCUCAGCCCAGGCACAGdTdT | 641 | CUGUGCCUGGGCUGAGGAG | 823 |
| AD-72329 | A-144977 | UGAGGAGGGCGCCGACGCCdTdT | 460 | A-144978 | GGCGUCGGCGCCCUCCUCAdTdT | 642 | UGAGGAGGGCGCCGACGCC | 824 |
| AD-72330 | A-144979 | CCGACGCCCUGGGCCCUGAdTdT | 461 | A-144980 | UCAGGGCCCAGGGCGUCGGdTdT | 643 | CCGACGCCCUGGGCCCUGA | 825 |
| AD-72331 | A-144981 | UGGGCCCUGAUGGCAAAUUdTdT | 462 | A-144982 | AAUUUGCCAUCAGGGCCCAdTdT | 644 | UGGGCCCUGAUGGCAAAUU | 826 |
| AD-72332 | A-144983 | CAAAUUGCUCCACUCGGAUdTdT | 463 | A-144984 | AUCCGAGUGGAGCAAUUUGdTdT | 645 | CAAAUUGCUCCACUCGGAU | 827 |
| AD-72333 | A-144985 | ACUCGGAUGCUUUCCCGCCdTdT | 464 | A-144986 | GGCGGGAAAGCAUCCGAGUdTdT | 646 | ACUCGGAUGCUUUCCCGCC | 828 |
| AD-72334 | A-144987 | UUUCCCGCCACCCCGCGUGdTdT | 465 | A-144988 | CACGCGGGGUGGCGGGAAAdTdT | 647 | UUUCCCGCCACCCCGCGUG | 829 |
| AD-72335 | A-144989 | CCGCGUGGUGGAUACACUGdTdT | 466 | A-144990 | CAGUGUAUCCACCACGCGGdTdT | 648 | CCGCGUGGUGGAUACACUG | 830 |
| AD-72336 | A-144991 | AUACACUGGGAGCUGGAGAdTdT | 467 | A-144992 | UCUCCAGCUCCCAGUGUAUdTdT | 649 | AUACACUGGGAGCUGGAGA | 831 |
| AD-72337 | A-144993 | AGCUGGAGACACCUUCAAUdTdT | 468 | A-144994 | AUUGAAGGUGUCUCCAGCUdTdT | 650 | AGCUGGAGACACCUUCAAU | 832 |
| AD-72338 | A-144995 | ACCUUCAAUGCCUCCGUCAdTdT | 469 | A-144996 | UGACGGAGGCAUUGAAGGUdTdT | 651 | ACCUUCAAUGCCUCCGUCA | 833 |
| AD-72339 | A-144997 | UCCGUCAUCUUCAGCCUCUdTdT | 470 | A-144998 | AGAGGCUGAAGAUGACGGAdTdT | 652 | UCCGUCAUCUUCAGCCUCU | 834 |
| AD-72498 | A-144999 | AGCCUCUCCCAGGGGAGGAdTdT | 471 | A-145000 | UCCUCCCCUGGGAGAGGCUdTdT | 653 | AGCCUCUCCCAGGGGAGGA | 835 |
| AD-72499 | A-145003 | UGCAGGAAGCACUGAGAUUdTdT | 472 | A-145004 | AAUCUCAGUGCUUCCUGCAdTdT | 654 | UGCAGGAAGCACUGAGAUU | 836 |
| AD-72500 | A-145005 | CUGAGAUUCGGGUGCCAGGdTdT | 473 | A-145006 | CCUGGCACCCGAAUCUCAGdTdT | 655 | CUGAGAUUCGGGUGCCAGG | 837 |
| AD-72501 | A-145007 | GGUGCCAGGUGGCCGGCAAdTdT | 474 | A-145008 | UUGCCGGCCACCUGGCACCdTdT | 656 | GGUGCCAGGUGGCCGGCAA | 838 |
| AD-72502 | A-145011 | AGUGUGGCCUGCAGGGCUUdTdT | 475 | A-145012 | AAGCCCUGCAGGCCACACUdTdT | 657 | AGUGUGGCCUGCAGGGCUU | 839 |
| AD-72503 | A-145013 | CAGGGCUUUGAUGGCAUCGdTdT | 476 | A-145014 | CGAUGCCAUCAAAGCCCUGdTdT | 658 | CAGGGCUUUGAUGGCAUCG | 840 |
| AD-72504 | A-145015 | GCAUCGUGUGAGAGCAGGUdTdT | 477 | A-145016 | ACCUGCUCUCACACGAUGCdTdT | 659 | GCAUCGUGUGAGAGCAGGU | 841 |
| AD-72505 | A-145017 | AGAGCAGGUGCCGGCUCCUdTdT | 478 | A-145018 | AGGAGCCGGCACCUGCUCUdTdT | 660 | AGAGCAGGUGCCGGCUCCU | 842 |
| AD-72506 | A-145019 | CCGGCUCCUCACACACCAUdTdT | 479 | A-145020 | AUGGUGUGUGAGGAGCCGGdTdT | 661 | CCGGCUCCUCACACACCAU | 843 |
| AD-72507 | A-145021 | CACACCAUGGAGACUACCAdTdT | 480 | A-145022 | UGGUAGUCUCCAUGGUGUGdTdT | 662 | CACACCAUGGAGACUACCA | 844 |
| AD-72508 | A-145023 | ACUACCAUUGCGGCUGCAUdTdT | 481 | A-145024 | AUGCAGCCGCAAUGGUAGUdTdT | 663 | ACUACCAUUGCGGCUGCAU | 845 |
| AD-72509 | A-145025 | CGGCUGCAUCGCCUUCUCCdTdT | 482 | A-145026 | GGAGAAGGCGAUGCAGCCGdTdT | 664 | CGGCUGCAUCGCCUUCUCC | 846 |
| AD-72510 | A-145027 | UUCUCCCCUCCAUCCAGCCdTdT | 483 | A-145028 | GGCUGGAUGGAGGGGAGAAdTdT | 665 | UUCUCCCCUCCAUCCAGCC | 847 |
| AD-72511 | A-145029 | AUCCAGCCUGGCGUCCAGGdTdT | 484 | A-145030 | CCUGGACGCCAGGCUGGAUdTdT | 666 | AUCCAGCCUGGCGUCCAGG | 848 |
| AD-72512 | A-145031 | GGCGUCCAGGUUGCCCUGUdTdT | 485 | A-145032 | ACAGGGCAACCUGGACGCCdTdT | 667 | GGCGUCCAGGUUGCCCUGU | 849 |
| AD-72513 | A-145033 | CCCUGUUCAGGGGACAGAUdTdT | 486 | A-145034 | AUCUGUCCCCUGAACAGGGdTdT | 668 | CCCUGUUCAGGGGACAGAU | 850 |
| AD-72514 | A-145035 | GGGGACAGAUGCAAGCUGUdTdT | 487 | A-145036 | ACAGCUUGCAUCUGUCCCCdTdT | 669 | GGGGACAGAUGCAAGCUGU | 851 |
| AD-72515 | A-145037 | CAAGCUGUGGGGAGGACUCdTdT | 488 | A-145038 | GAGUCCUCCCCACAGCUUGdTdT | 670 | CAAGCUGUGGGGAGGACUC | 852 |
| AD-72516 | A-145039 | AGGACUCUGCCUGUGUCCUdTdT | 489 | A-145040 | AGGACACAGGCAGAGUCCUdTdT | 671 | AGGACUCUGCCUGUGUCCU | 853 |
| AD-72517 | A-145041 | CUGUGUCCUGUGUUCCCCAdTdT | 490 | A-145042 | UGGGGAACACAGGACACAGdTdT | 672 | CUGUGUCCUGUGUUCCCCA | 854 |
| AD-72518 | A-145043 | UUCCCCACAGGGAGAGGCUdTdT | 491 | A-145044 | AGCCUCUCCCUGUGGGGAAdTdT | 673 | UUCCCCACAGGGAGAGGCU | 855 |
| AD-72519 | A-145045 | AGAGGCUCUGGGGGGAUGGdTdT | 492 | A-145046 | CCAUCCCCCCAGAGCCUCUdTdT | 674 | AGAGGCUCUGGGGGGAUGG | 856 |
| AD-72520 | A-145047 | GGGGGGAUGGCUGGGGGAUdTdT | 493 | A-145048 | AUCCCCCAGCCAUCCCCCCdTdT | 675 | GGGGGGAUGGCUGGGGGAU | 857 |
| AD-72521 | A-145049 | UGGGGGAUGCAGAGCCUCAdTdT | 494 | A-145050 | UGAGGCUCUGCAUCCCCCAdTdT | 676 | UGGGGGAUGCAGAGCCUCA | 858 |
| AD-72522 | A-145051 | AGCCUCAGAGCAAAUAAAUdTdT | 495 | A-145052 | AUUUAUUUGCUCUGAGGCUdTdT | 677 | AGCCUCAGAGCAAAUAAAU | 859 |
| AD-72523 | A-145053 | AAAUAAAUCUUCCUCAGAGdTdT | 496 | A-145054 | CUCUGAGGAAGAUUUAUUUdTdT | 678 | AAAUAAAUCUUCCUCAGAG | 860 |
| AD-72524 | A-145055 | CCUCAGAGCCAGCUUCUCCdTdT | 497 | A-145056 | GGAGAAGCUGGCUCUGAGGdTdT | 679 | CCUCAGAGCCAGCUUCUCC | 861 |
| AD-72525 | A-145057 | AGCUUCUCCUCUCAAUGUCdTdT | 498 | A-145058 | GACAUUGAGAGGAGAAGCUdTdT | 680 | AGCUUCUCCUCUCAAUGUC | 862 |
| AD-72526 | A-145059 | UCAAUGUCUGAACUGCUCUdTdT | 499 | A-145060 | AGAGCAGUUCAGACAUUGAdTdT | 681 | UCAAUGUCUGAACUGCUCU | 863 |
| AD-72527 | A-145061 | UGCUCUGGCUGGGCAUUCCdTdT | 500 | A-145062 | GGAAUGCCCAGCCAGAGCAdTdT | 682 | UGCUCUGGCUGGGCAUUCC | 864 |
| AD-72528 | A-145063 | UGGGCAUUCCUGAGGCUCUdTdT | 501 | A-145064 | AGAGCCUCAGGAAUGCCCAdTdT | 683 | UGGGCAUUCCUGAGGCUCU | 865 |
| AD-72529 | A-145065 | GAGGCUCUGACUCUUCGAUdTdT | 502 | A-145066 | AUCGAAGAGUCAGAGCCUCdTdT | 684 | GAGGCUCUGACUCUUCGAU | 866 |
| AD-72530 | A-145071 | CCAUUCCCCAAAUUAACCUdTdT | 503 | A-145072 | AGGUUAAUUUGGGGAAUGGdTdT | 685 | CCAUUCCCCAAAUUAACCU | 867 |
| AD-72531 | A-145073 | UUAACCUCUCCGCCCAGGCdTdT | 504 | A-145074 | GCCUGGGCGGAGAGGUUAAdTdT | 686 | UUAACCUCUCCGCCCAGGC | 868 |
| AD-72532 | A-145075 | GCCCAGGCCCAGAGGAGGGdTdT | 505 | A-145076 | CCCUCCUCUGGGCCUGGGCdTdT | 687 | GCCCAGGCCCAGAGGAGGG | 869 |
| AD-72533 | A-145077 | CAGAGGAGGGGCUGCCUGGdTdT | 506 | A-145078 | CCAGGCAGCCCCUCCUCUGdTdT | 688 | CAGAGGAGGGGCUGCCUGG | 870 |
| AD-72534 | A-145079 | UGCCUGGGCUAGAGCAGCGdTdT | 507 | A-145080 | CGCUGCUCUAGCCCAGGCAdTdT | 689 | UGCCUGGGCUAGAGCAGCG | 871 |
| AD-72535 | A-145081 | AGAGCAGCGAGAAGUGCCCdTdT | 508 | A-145082 | GGGCACUUCUCGCUGCUCUdTdT | 690 | AGAGCAGCGAGAAGUGCCC | 872 |
| AD-72536 | A-145083 | AAGUGCCCUGGGCUUGCCAdTdT | 509 | A-145084 | UGGCAAGCCCAGGGCACUUdTdT | 691 | AAGUGCCCUGGGCUUGCCA | 873 |
| AD-72537 | A-145085 | UUGCCACCAGCUCUGCCCUdTdT | 510 | A-145086 | AGGGCAGAGCUGGUGGCAAdTdT | 692 | UUGCCACCAGCUCUGCCCU | 874 |
| AD-72538 | A-145087 | CUCUGCCCUGGCUGGGGAGdTdT | 511 | A-145088 | CUCCCCAGCCAGGGCAGAGdTdT | 693 | CUCUGCCCUGGCUGGGGAG | 875 |
| AD-72539 | A-145089 | GCUGGGGAGGACACUCGGUdTdT | 512 | A-145090 | ACCGAGUGUCCUCCCCAGCdTdT | 694 | GCUGGGGAGGACACUCGGU | 876 |
| AD-72540 | A-145093 | ACACCCAGUGAACCUGCCAdTdT | 513 | A-145094 | UGGCAGGUUCACUGGGUGUdTdT | 695 | ACACCCAGUGAACCUGCCA | 877 |
| AD-72541 | A-145095 | AACCUGCCAAAGAAACCGUdTdT | 514 | A-145096 | ACGGUUUCUUUGGCAGGUUdTdT | 696 | AACCUGCCAAAGAAACCGU | 878 |
| AD-72542 | A-145097 | AGAAACCGUGAGAGCUCUUdTdT | 515 | A-145098 | AAGAGCUCUCACGGUUUCUdTdT | 697 | AGAAACCGUGAGAGCUCUU | 879 |
| AD-72543 | A-145099 | GCUCUUCGGGGCCCUGCGUdTdT | 516 | A-145100 | ACGCAGGGCCCCGAAGAGCdTdT | 698 | GCUCUUCGGGGCCCUGCGU | 880 |
| AD-72544 | A-145101 | CCCUGCGUUGUGCAGACUCdTdT | 517 | A-145102 | GAGUCUGCACAACGCAGGGdTdT | 699 | CCCUGCGUUGUGCAGACUC | 881 |
| AD-72545 | A-145103 | UGCAGACUCUAUUCCCACAdTdT | 518 | A-145104 | UGUGGGAAUAGAGUCUGCAdTdT | 700 | UGCAGACUCUAUUCCCACA | 882 |
| AD-72546 | A-145105 | UUCCCACAGCUCAGAAGCUdTdT | 519 | A-145106 | AGCUUCUGAGCUGUGGGAAdTdT | 701 | UUCCCACAGCUCAGAAGCU | 883 |
| AD-72547 | A-145107 | CAGAAGCUGGGAGUCCACAdTdT | 520 | A-145108 | UGUGGACUCCCAGCUUCUGdTdT | 702 | CAGAAGCUGGGAGUCCACA | 884 |
| AD-72548 | A-145109 | GAGUCCACACCGCUGAGCUdTdT | 521 | A-145110 | AGCUCAGCGGUGUGGACUCdTdT | 703 | GAGUCCACACCGCUGAGCU | 885 |
| AD-72549 | A-145111 | UGAGCUGAACUGACAGGCCdTdT | 522 | A-145112 | GGCCUGUCAGUUCAGCUCAdTdT | 704 | UGAGCUGAACUGACAGGCC | 886 |
| AD-72550 | A-145113 | UGACAGGCCAGUGGGGGGCdTdT | 523 | A-145114 | GCCCCCCACUGGCCUGUCAdTdT | 705 | UGACAGGCCAGUGGGGGGC | 887 |
| AD-72551 | A-145115 | UGGGGGGCAGGGGUGCGCCdTdT | 524 | A-145116 | GGCGCACCCCUGCCCCCCAdTdT | 706 | UGGGGGGCAGGGGUGCGCC | 888 |
| AD-72552 | A-145117 | GGUGCGCCUCCUCUGCCCUdTdT | 525 | A-145118 | AGGGCAGAGGAGGCGCACCdTdT | 707 | GGUGCGCCUCCUCUGCCCU | 889 |
| AD-72553 | A-145119 | UCUGCCCUGCCCACCAGCCdTdT | 526 | A-145120 | GGCUGGUGGGCAGGGCAGAdTdT | 708 | UCUGCCCUGCCCACCAGCC | 890 |
| AD-72554 | A-145121 | ACCAGCCUGUGAUUUGAUGdTdT | 527 | A-145122 | CAUCAAAUCACAGGCUGGUdTdT | 709 | ACCAGCCUGUGAUUUGAUG | 891 |
| AD-72555 | A-145123 | UGAUUUGAUGGGGUCUUCAdTdT | 528 | A-145124 | UGAAGACCCCAUCAAAUCAdTdT | 710 | UGAUUUGAUGGGGUCUUCA | 892 |
| AD-72556 | A-145125 | GUCUUCAUUGUCCAGAAAUdTdT | 529 | A-145126 | AUUUCUGGACAAUGAAGACdTdT | 711 | GUCUUCAUUGUCCAGAAAU | 893 |
| AD-72557 | A-145127 | UCCAGAAAUACCUCCUCCCdTdT | 530 | A-145128 | GGGAGGAGGUAUUUCUGGAdTdT | 712 | UCCAGAAAUACCUCCUCCC | 894 |
| AD-72558 | A-145129 | UCCUCCCGCUGACUGCCCCdTdT | 531 | A-145130 | GGGGCAGUCAGCGGGAGGAdTdT | 713 | UCCUCCCGCUGACUGCCCC | 895 |
| AD-72559 | A-145131 | ACUGCCCCAGAGCCUGAAAdTdT | 532 | A-145132 | UUUCAGGCUCUGGGGCAGUdTdT | 714 | ACUGCCCCAGAGCCUGAAA | 896 |
| AD-72560 | A-145133 | AGCCUGAAAGUCUCACCCUdTdT | 533 | A-145134 | AGGGUGAGACUUUCAGGCUdTdT | 715 | AGCCUGAAAGUCUCACCCU | 897 |
| AD-72561 | A-145135 | UCACCCUUGGAGCCCACCUdTdT | 534 | A-145136 | AGGUGGGCUCCAAGGGUGAdTdT | 716 | UCACCCUUGGAGCCCACCU | 898 |
| AD-72562 | A-145137 | CCCACCUUGGAAUUAAGGGdTdT | 535 | A-145138 | CCCUUAAUUCCAAGGUGGGdTdT | 717 | CCCACCUUGGAAUUAAGGG | 899 |
| AD-72563 | A-145139 | GAAUUAAGGGCGUGCCUCAdTdT | 536 | A-145140 | UGAGGCACGCCCUUAAUUCdTdT | 718 | GAAUUAAGGGCGUGCCUCA | 900 |
| AD-72564 | A-145141 | UGCCUCAGCCACAAAUGUGdTdT | 537 | A-145142 | CACAUUUGUGGCUGAGGCAdTdT | 719 | UGCCUCAGCCACAAAUGUG | 901 |
| AD-72565 | A-145143 | ACAAAUGUGACCCAGGAUAdTdT | 538 | A-145144 | UAUCCUGGGUCACAUUUGUdTdT | 720 | ACAAAUGUGACCCAGGAUA | 902 |
| AD-72566 | A-145145 | CAGGAUACAGAGUGUUGCUdTdT | 539 | A-145146 | AGCAACACUCUGUAUCCUGdTdT | 721 | CAGGAUACAGAGUGUUGCU | 903 |
| AD-72567 | A-145147 | AGUGUUGCUGUCCUCAGGGdTdT | 540 | A-145148 | CCCUGAGGACAGCAACACUdTdT | 722 | AGUGUUGCUGUCCUCAGGG | 904 |
| AD-72568 | A-145149 | CCUCAGGGAGGUCCGAUCUdTdT | 541 | A-145150 | AGAUCGGACCUCCCUGAGGdTdT | 723 | CCUCAGGGAGGUCCGAUCU | 905 |
| AD-72569 | A-145151 | UCCGAUCUGGAACACAUAUdTdT | 542 | A-145152 | AUAUGUGUUCCAGAUCGGAdTdT | 724 | UCCGAUCUGGAACACAUAU | 906 |
| AD-72570 | A-145153 | ACACAUAUUGGAAUUGGGGdTdT | 543 | A-145154 | CCCCAAUUCCAAUAUGUGUdTdT | 725 | ACACAUAUUGGAAUUGGGG | 907 |
| AD-72571 | A-145155 | UUGGGGCCAACUCCAAUAUdTdT | 544 | A-145156 | AUAUUGGAGUUGGCCCCAAdTdT | 726 | UUGGGGCCAACUCCAAUAU | 908 |
| AD-72572 | A-145157 | ACUCCAAUAUAGGGUGGGUdTdT | 545 | A-145158 | ACCCACCCUAUAUUGGAGUdTdT | 727 | ACUCCAAUAUAGGGUGGGU | 909 |
| AD-72573 | A-145159 | GUGGGUAAGGCCUUAUAAUdTdT | 546 | A-145160 | AUUAUAAGGCCUUACCCACdTdT | 728 | GUGGGUAAGGCCUUAUAAU | 910 |
| AD-72574 | A-145161 | CCUUAUAAUGUAAAGAGCAdTdT | 547 | A-145162 | UGCUCUUUACAUUAUAAGGdTdT | 729 | CCUUAUAAUGUAAAGAGCA | 911 |
| AD-72575 | A-145163 | AAGAGCAUAUAAUGUAAAGdTdT | 548 | A-145164 | CUUUACAUUAUAUGCUCUUdTdT | 730 | AAGAGCAUAUAAUGUAAAG | 912 |
| AD-72576 | A-145165 | UAAUGUAAAGGGCUUUAGAdTdT | 549 | A-145166 | UCUAAAGCCCUUUACAUUAdTdT | 731 | UAAUGUAAAGGGCUUUAGA | 913 |
| AD-72577 | A-145167 | UUUAGAGUGAGACAGACCUdTdT | 550 | A-145168 | AGGUCUGUCUCACUCUAAAdTdT | 732 | UUUAGAGUGAGACAGACCU | 914 |
| AD-72578 | A-145169 | ACAGACCUGGAUUAAAAUCdTdT | 551 | A-145170 | GAUUUUAAUCCAGGUCUGUdTdT | 733 | ACAGACCUGGAUUAAAAUC | 915 |
| AD-72579 | A-145171 | UUAAAAUCUGCCAUUUAAUdTdT | 552 | A-145172 | AUUAAAUGGCAGAUUUUAAdTdT | 734 | UUAAAAUCUGCCAUUUAAU | 916 |
| AD-72580 | A-145173 | CAUUUAAUUAGCUGCAUAUdTdT | 553 | A-145174 | AUAUGCAGCUAAUUAAAUGdTdT | 735 | CAUUUAAUUAGCUGCAUAU | 917 |
| AD-72581 | A-145177 | CUUAGGGUACAGCACUUAAdTdT | 554 | A-145178 | UUAAGUGCUGUACCCUAAGdTdT | 736 | CUUAGGGUACAGCACUUAA | 918 |
| AD-72582 | A-145179 | CAGCACUUAACGCAAUCUGdTdT | 555 | A-145180 | CAGAUUGCGUUAAGUGCUGdTdT | 737 | CAGCACUUAACGCAAUCUG | 919 |
| AD-72583 | A-145181 | GCAAUCUGCCUCAAUUUCUdTdT | 556 | A-145182 | AGAAAUUGAGGCAGAUUGCdTdT | 738 | GCAAUCUGCCUCAAUUUCU | 920 |
| AD-72584 | A-145183 | AAUUUCUUCAUCUGUCAAAdTdT | 557 | A-145184 | UUUGACAGAUGAAGAAAUUdTdT | 739 | AAUUUCUUCAUCUGUCAAA | 921 |
| AD-72590 | A-145187 | GAACCAAUUCUGCUUGGCUdTdT | 558 | A-145188 | AGCCAAGCAGAAUUGGUUCdTdT | 740 | GAACCAAUUCUGCUUGGCU | 922 |
| AD-72591 | A-145189 | UUGGCUACAGAAUUAUUGUdTdT | 559 | A-145190 | ACAAUAAUUCUGUAGCCAAdTdT | 741 | UUGGCUACAGAAUUAUUGU | 923 |
| AD-72592 | A-145191 | AUUAUUGUGAGGAUAAAAUdTdT | 560 | A-145192 | AUUUUAUCCUCACAAUAAUdTdT | 742 | AUUAUUGUGAGGAUAAAAU | 924 |
| AD-72593 | A-145193 | AGGAUAAAAUCAUAUAUAAdTdT | 561 | A-145194 | UUAUAUAUGAUUUUAUCCUdTdT | 743 | AGGAUAAAAUCAUAUAUAA | 925 |
| AD-72594 | A-145195 | UAUAUAAAAUGCCCAGCAUdTdT | 562 | A-145196 | AUGCUGGGCAUUUUAUAUAdTdT | 744 | UAUAUAAAAUGCCCAGCAU | 926 |

| Informal Sequence Listing | |
|---|---|
| <210> 1 | |
| <211> 2433 | |
| <212> DNA | |
| <213> Homo sapiens | |
| <400> 1 | |
| ggggcggggc cgccgcgacc gcgggcttca ggcagggctg cagatgcgag gcccagctgt | 60 |
| acctcgcgtg tcccgggtcg ggagtcggag acgcaggtgc aggagagtgc ggggcaagta | 120 |
| gcgcattttc tctttgcatt ctcgagatcg cttagccgcg ctttaaaaag gtttgcatca | 180 |
| gctgtgagtc catctgacaa gcgaggaaac taaggctgag aagtgggagg cgttgccatc | 240 |
| tgcaggccca ggcaacctgc tacgggaaga ccggggacca agacctctgg gttggctttc | 300 |
| ctagacccgc tcgggtcttc gggtgtcgcg aggaagggcc ctgctccttt cgttccctgc | 360 |
| acccctggcc gctgcaggtg gctccctgga ggaggagctc ccacgcggag gaggagccag | 420 |
| ggcagctggg agcggggaca ccatcctcct ggataagagg cagaggccgg gaggaacccc | 480 |
| gtcagccggg cgggcaggaa gctctgggag tagcctcatg gaagagaagc agatcctgtg | 540 |
| cgtggggcta gtggtgctgg acgtcatcag cctggtggac aagtacccta aggaggactc | 600 |
| ggagataagg tgtttgtccc agagatggca gcgcggaggc aacgcgtcca actcctgcac | 660 |
| cgttctctcc ctgctcggag ccccctgtgc cttcatgggc tcaatggctc ctggccatgt | 720 |
| tgctgacttc ctggtggccg acttcaggcg gcggggcgtg gacgtgtctc aggtggcctg | 780 |
| gcagagcaag ggggacaccc ccagctcctg ctgcatcatc aacaactcca atggcaaccg | 840 |
| taccattgtg ctccatgaca cgagcctgcc agatgtgtct gctacagact ttgagaaggt | 900 |
| tgatctgacc cagttcaagt ggatccacat tgagggccgg aacgcatcgg agcaggtgaa | 960 |
| gatgctgcag cggatagacg cacacaacac caggcagcct ccagagcaga agatccgggt | 1020 |
| gtccgtggag gtggagaagc cacgagagga gctcttccag ctgtttggct acggagacgt | 1080 |
| ggtgtttgtc agcaaagatg tggccaagca cttggggttc cagtcagcag aggaagcctt | 1140 |
| gaggggcttg tatggtcgtg tgaggaaagg ggctgtgctt gtctgtgcct gggctgagga | 1200 |
| gggcgccgac gccctgggcc ctgatggcaa attgctccac tcggatgctt tcccgccacc | 1260 |
| ccgcgtggtg gatacactgg gagctggaga caccttcaat gcctccgtca tcttcagcct | 1320 |
| ctcccagggg aggagcgtgc aggaagcact gagattcggg tgccaggtgg ccggcaagaa | 1380 |
| gtgtggcctg cagggctttg atggcatcgt gtgagagcag gtgccggctc ctcacacacc | 1440 |
| atggagacta ccattgcggc tgcatcgcct tctcccctcc atccagcctg gcgtccaggt | 1500 |
| tgccctgttc aggggacaga tgcaagctgt ggggaggact ctgcctgtgt cctgtgttcc | 1560 |
| ccacagggag aggctctggg gggatggctg ggggatgcag agcctcagag caaataaatc | 1620 |
| ttcctcagag ccagcttctc ctctcaatgt ctgaactgct ctggctgggc attcctgagg | 1680 |
| ctctgactct tcgatcctcc ctctttgtgt ccattcccca aattaacctc tccgcccagg | 1740 |
| cccagaggag gggctgcctg ggctagagca gcgagaagtg ccctgggctt gccaccagct | 1800 |
| ctgccctggc tggggaggac actcggtgcc ccacacccag tgaacctgcc aaagaaaccg | 1860 |
| tgagagctct tcggggccct gcgttgtgca gactctattc ccacagctca gaagctggga | 1920 |
| gtccacaccg ctgagctgaa ctgacaggcc agtggggggc aggggtgcgc ctcctctgcc | 1980 |
| ctgcccacca gcctgtgatt tgatggggtc ttcattgtcc agaaatacct cctcccgctg | 2040 |
| actgccccag agcctgaaag tctcaccctt ggagcccacc ttggaattaa gggcgtgcct | 2100 |
| cagccacaaa tgtgacccag gatacagagt gttgctgtcc tcagggaggt ccgatctgga | 2160 |
| acacatattg gaattggggc caactccaat atagggtggg taaggcctta taatgtaaag | 2220 |
| agcatataat gtaaagggct ttagagtgag acagacctgg attcaaatct gccatttaat | 2280 |
| tagctgcata tcaccttagg gtacagcact taacgcaatc tgcctcaatt tcttcatctg | 2340 |
| tcaaatggaa ccaattctgc ttggctacag aattattgtg aggataaaat catatataaa | 2400 |
| atgcccagca tgatgaaaaa aaaaaaaaaa aaa | 2433 |
| <210> 2 | |
| <211> 2433 | |
| <212> DNA | |
| <213> Homo sapiens | |
| <400> 2 | |
| tttttttttt ttttttttca tcatgctggg cattttatat atgattttat cctcacaata | 60 |
| attctgtagc caagcagaat tggttccatt tgacagatga agaaattgag gcagattgcg | 120 |
| ttaagtgctg taccctaagg tgatatgcag ctaattaaat ggcagatttg aatccaggtc | 180 |
| tgtctcactc taaagccctt tacattatat gctctttaca ttataaggcc ttacccaccc | 240 |
| tatattggag ttggccccaa ttccaatatg tgttccagat cggacctccc tgaggacagc | 300 |
| aacactctgt atcctgggtc acatttgtgg ctgaggcacg cccttaattc caaggtgggc | 360 |
| tccaagggtg agactttcag gctctggggc agtcagcggg aggaggtatt tctggacaat | 420 |
| gaagacccca tcaaatcaca ggctggtggg cagggcagag gaggcgcacc cctgcccccc | 480 |
| actggcctgt cagttcagct cagcggtgtg gactcccagc ttctgagctg tgggaataga | 540 |
| gtctgcacaa cgcagggccc cgaagagctc tcacggtttc tttggcaggt tcactgggtg | 600 |
| tggggcaccg agtgtcctcc ccagccaggg cagagctggt ggcaagccca gggcacttct | 660 |
| cgctgctcta gcccaggcag cccctcctct gggcctgggc ggagaggtta atttggggaa | 720 |
| tggacacaaa gagggaggat cgaagagtca gagcctcagg aatgcccagc cagagcagtt | 780 |
| cagacattga gaggagaagc tggctctgag gaagatttat ttgctctgag gctctgcatc | 840 |
| ccccagccat ccccccagag cctctccctg tggggaacac aggacacagg cagagtcctc | 900 |
| cccacagctt gcatctgtcc cctgaacagg gcaacctgga cgccaggctg gatggagggg | 960 |
| agaaggcgat gcagccgcaa tggtagtctc catggtgtgt gaggagccgg cacctgctct | 1020 |
| cacacgatgc catcaaagcc ctgcaggcca cacttcttgc cggccacctg gcacccgaat | 1080 |
| ctcagtgctt cctgcacgct cctcccctgg gagaggctga agatgacgga ggcattgaag | 1140 |
| gtgtctccag ctcccagtgt atccaccacg cggggtggcg ggaaagcatc cgagtggagc | 1200 |
| aatttgccat cagggcccag ggcgtcggcg ccctcctcag cccaggcaca gacaagcaca | 1260 |
| gcccctttcc tcacacgacc atacaagccc ctcaaggctt cctctgctga ctggaacccc | 1320 |
| aagtgcttgg ccacatcttt gctgacaaac accacgtctc cgtagccaaa cagctggaag | 1380 |
| agctcctctc gtggcttctc cacctccacg gacacccgga tcttctgctc tggaggctgc | 1440 |
| ctggtgttgt gtgcgtctat ccgctgcagc atcttcacct gctccgatgc gttccggccc | 1500 |
| tcaatgtgga tccacttgaa ctgggtcaga tcaaccttct caaagtctgt agcagacaca | 1560 |
| tctggcaggc tcgtgtcatg gagcacaatg gtacggttgc cattggagtt gttgatgatg | 1620 |
| cagcaggagc tgggggtgtc ccccttgctc tgccaggcca cctgagacac gtccacgccc | 1680 |
| cgccgcctga agtcggccac caggaagtca gcaacatggc caggagccat tgagcccatg | 1740 |
| aaggcacagg gggctccgag cagggagaga acggtgcagg agttggacgc gttgcctccg | 1800 |
| cgctgccatc tctgggacaa acaccttatc tccgagtcct ccttagggta cttgtccacc | 1860 |
| aggctgatga cgtccagcac cactagcccc acgcacagga tctgcttctc ttccatgagg | 1920 |
| ctactcccag agcttcctgc ccgcccggct gacggggttc ctcccggcct ctgcctctta | 1980 |
| tccaggagga tggtgtcccc gctcccagct gccctggctc ctcctccgcg tgggagctcc | 2040 |
| tcctccaggg agccacctgc agcggccagg ggtgcaggga acgaaaggag cagggccctt | 2100 |
| cctcgcgaca cccgaagacc cgagcgggtc taggaaagcc aacccagagg tcttggtccc | 2160 |
| cggtcttccc gtagcaggtt gcctgggcct gcagatggca acgcctccca cttctcagcc | 2220 |
| ttagtttcct cgcttgtcag atggactcac agctgatgca aaccttttta aagcgcggct | 2280 |
| aagcgatctc gagaatgcaa agagaaaatg cgctacttgc cccgcactct cctgcacctg | 2340 |
| cgtctccgac tcccgacccg ggacacgcga ggtacagctg ggcctcgcat ctgcagccct | 2400 |
| gcctgaagcc cgcggtcgcg gcggccccgc ccc | 2433 |
| <210> 3 | |
| <211> 2433 | |
| <212> DNA | |
| <213> Homo sapiens | |
| <400> 3 | |
| ggggcggggc cgccgcgacc gcgggcttca ggcagggctg cagatgcgag gcccagctgt | 60 |
| acctcgcgtg tcccgggtcg ggagtcggag acgcaggtgc aggagagtgc ggggcaagta | 120 |
| gcgcattttc tctttgcatt ctcgagatcg cttagccgcg ctttaaaaag gtttgcatca | 180 |
| gctgtgagtc catctgacaa gcgaggaaac taaggctgag aagtgggagg cgttgccatc | 240 |
| tgcaggccca ggcaacctgc tacgggaaga ccggggacca agacctctgg gttggctttc | 300 |
| ctagacccgc tcgggtcttc gggtgtcgcg aggaagggcc ctgctccttt cgttccctgc | 360 |
| acccctggcc gctgcaggtg gctccctgga ggaggagctc ccacgcggag gaggagccag | 420 |
| ggcagctggg agcggggaca ccatcctcct ggataagagg cagaggccgg gaggaacccc | 480 |
| gtcagccggg cgggcaggaa gctctgggag tagcctcatg gaagagaagc agatcctgtg | 540 |
| cgtggggcta gtggtgctgg acgtcatcag cctggtggac aagtacccta aggaggactc | 600 |
| ggagataagg tgtttgtccc agagatggca gcgcggaggc aacgcgtcca actcctgcac | 660 |
| cgttctctcc ctgctcggag ccccctgtgc cttcatgggc tcaatggctc ctggccatgt | 720 |
| tgctgatttt gtcctggatg acctccgccg ctattctgtg gacctacgct acacagtctt | 780 |
| tcagaccaca ggctccgtcc ccatcgccac ggtcatcatc aacgaggcca gtggtagccg | 840 |
| caccatccta tactatgaca ggagcctgcc agatgtgtct gctacagact ttgagaaggt | 900 |
| tgatctgacc cagttcaagt ggatccacat tgagggccgg aacgcatcgg agcaggtgaa | 960 |
| gatgctgcag cggatagacg cacacaacac caggcagcct ccagagcaga agatccgggt | 1020 |
| gtccgtggag gtggagaagc cacgagagga gctcttccag ctgtttggct acggagacgt | 1080 |
| ggtgtttgtc agcaaagatg tggccaagca cttggggttc cagtcagcag aggaagcctt | 1140 |
| gaggggcttg tatggtcgtg tgaggaaagg ggctgtgctt gtctgtgcct gggctgagga | 1200 |
| gggcgccgac gccctgggcc ctgatggcaa attgctccac tcggatgctt tcccgccacc | 1260 |
| ccgcgtggtg gatacactgg gagctggaga caccttcaat gcctccgtca tcttcagcct | 1320 |
| ctcccagggg aggagcgtgc aggaagcact gagattcggg tgccaggtgg ccggcaagaa | 1380 |
| gtgtggcctg cagggctttg atggcatcgt gtgagagcag gtgccggctc ctcacacacc | 1440 |
| atggagacta ccattgcggc tgcatcgcct tctcccctcc atccagcctg gcgtccaggt | 1500 |
| tgccctgttc aggggacaga tgcaagctgt ggggaggact ctgcctgtgt cctgtgttcc | 1560 |
| ccacagggag aggctctggg gggatggctg ggggatgcag agcctcagag caaataaatc | 1620 |
| ttcctcagag ccagcttctc ctctcaatgt ctgaactgct ctggctgggc attcctgagg | 1680 |
| ctctgactct tcgatcctcc ctctttgtgt ccattcccca aattaacctc tccgcccagg | 1740 |
| cccagaggag gggctgcctg ggctagagca gcgagaagtg ccctgggctt gccaccagct | 1800 |
| ctgccctggc tggggaggac actcggtgcc ccacacccag tgaacctgcc aaagaaaccg | 1860 |
| tgagagctct tcggggccct gcgttgtgca gactctattc ccacagctca gaagctggga | 1920 |
| gtccacaccg ctgagctgaa ctgacaggcc agtggggggc aggggtgcgc ctcctctgcc | 1980 |
| ctgcccacca gcctgtgatt tgatggggtc ttcattgtcc agaaatacct cctcccgctg | 2040 |
| actgccccag agcctgaaag tctcaccctt ggagcccacc ttggaattaa gggcgtgcct | 2100 |
| cagccacaaa tgtgacccag gatacagagt gttgctgtcc tcagggaggt ccgatctgga | 2160 |
| acacatattg gaattggggc caactccaat atagggggg taaggcctta taatgtaaag | 2220 |
| agcatataat gtaaagggct ttagagtgag acagacctgg attcaaatct gccatttaat | 2280 |
| tagctgcata tcaccttagg gtacagcact taacgcaatc tgcctcaatt tcttcatctg | 2340 |
| tcaaatggaa ccaattctgc ttggctacag aattattgtg aggataaaat catatataaa | 2400 |
| atgcccagca tgatgaaaaa aaaaaaaaaa aaa | 2433 |
| <210> 4 | |
| <211> 2433 | |
| <212> DNA | |
| <213> Homo sapiens | |
| <400> 4 | |
| tttttttttt ttttttttca tcatgctggg cattttatat atgattttat cctcacaata | 60 |
| attctgtagc caagcagaat tggttccatt tgacagatga agaaattgag gcagattgcg | 120 |
| ttaagtgctg taccctaagg tgatatgcag ctaattaaat ggcagatttg aatccaggtc | 180 |
| tgtctcactc taaagccctt tacattatat gctctttaca ttataaggcc ttacccaccc | 240 |
| tatattggag ttggccccaa ttccaatatg tgttccagat cggacctccc tgaggacagc | 300 |
| aacactctgt atcctgggtc acatttgtgg ctgaggcacg cccttaattc caaggtgggc | 360 |
| tccaagggtg agactttcag gctctggggc agtcagcggg aggaggtatt tctggacaat | 420 |
| gaagacccca tcaaatcaca ggctggtggg cagggcagag gaggcgcacc cctgcccccc | 480 |
| actggcctgt cagttcagct cagcggtgtg gactcccagc ttctgagctg tgggaataga | 540 |
| gtctgcacaa cgcagggccc cgaagagctc tcacggtttc tttggcaggt tcactgggtg | 600 |
| tggggcaccg agtgtcctcc ccagccaggg cagagctggt ggcaagccca gggcacttct | 660 |
| cgctgctcta gcccaggcag cccctcctct gggcctgggc ggagaggtta atttggggaa | 720 |
| tggacacaaa gagggaggat cgaagagtca gagcctcagg aatgcccagc cagagcagtt | 780 |
| cagacattga gaggagaagc tggctctgag gaagatttat ttgctctgag gctctgcatc | 840 |
| ccccagccat ccccccagag cctctccctg tggggaacac aggacacagg cagagtcctc | 900 |
| cccacagctt gcatctgtcc cctgaacagg gcaacctgga cgccaggctg gatggagggg | 960 |
| agaaggcgat gcagccgcaa tggtagtctc catggtgtgt gaggagccgg cacctgctct | 1020 |
| cacacgatgc catcaaagcc ctgcaggcca cacttcttgc cggccacctg gcacccgaat | 1080 |
| ctcagtgctt cctgcacgct cctcccctgg gagaggctga agatgacgga ggcattgaag | 1140 |
| gtgtctccag ctcccagtgt atccaccacg cggggtggcg ggaaagcatc cgagtggagc | 1200 |
| aatttgccat cagggcccag ggcgtcggcg ccctcctcag cccaggcaca gacaagcaca | 1260 |
| gcccctttcc tcacacgacc atacaagccc ctcaaggctt cctctgctga ctggaacccc | 1320 |
| aagtgcttgg ccacatcttt gctgacaaac accacgtctc cgtagccaaa cagctggaag | 1380 |
| agctcctctc gtggcttctc cacctccacg gacacccgga tcttctgctc tggaggctgc | 1440 |
| ctggtgttgt gtgcgtctat ccgctgcagc atcttcacct gctccgatgc gttccggccc | 1500 |
| tcaatgtgga tccacttgaa ctgggtcaga tcaaccttct caaagtctgt agcagacaca | 1560 |
| tctggcaggc tcctgtcata gtataggatg gtgcggctac cactggcctc gttgatgatg | 1620 |
| accgtggcga tggggacgga gcctgtggtc tgaaagactg tgtagcgtag gtccacagaa | 1680 |
| tagcggcgga ggtcatccag gacaaaatca gcaacatggc caggagccat tgagcccatg | 1740 |
| aaggcacagg gggctccgag cagggagaga acggtgcagg agttggacgc gttgcctccg | 1800 |
| cgctgccatc tctgggacaa acaccttatc tccgagtcct ccttagggta cttgtccacc | 1860 |
| aggctgatga cgtccagcac cactagcccc acgcacagga tctgcttctc ttccatgagg | 1920 |
| ctactcccag agcttcctgc ccgcccggct gacggggttc ctcccggcct ctgcctctta | 1980 |
| tccaggagga tggtgtcccc gctcccagct gccctggctc ctcctccgcg tgggagctcc | 2040 |
| tcctccaggg agccacctgc agcggccagg ggtgcaggga acgaaaggag cagggccctt | 2100 |
| cctcgcgaca cccgaagacc cgagcgggtc taggaaagcc aacccagagg tcttggtccc | 2160 |
| cggtcttccc gtagcaggtt gcctgggcct gcagatggca acgcctccca cttctcagcc | 2220 |
| ttagtttcct cgcttgtcag atggactcac agctgatgca aaccttttta aagcgcggct | 2280 |
| aagcgatctc gagaatgcaa agagaaaatg cgctacttgc cccgcactct cctgcacctg | 2340 |
| cgtctccgac tcccgacccg ggacacgcga ggtacagctg ggcctcgcat ctgcagccct | 2400 |
| gcctgaagcc cgcggtcgcg gcggccccgc ccc | 2433 |
| <210> 5 | |
| <211> 2144 | |
| <212> DNA | |
| <213> Homo sapiens | |
| <400> 5 | |
| accgcgggct tcaggcaggg ctgcagatgc gaggcccagc tgtacctcgc gtgtcccggg | 60 |
| tcgggagtcg gagacgcagg tgcaggagag tgcggggcaa gtagcgcatt ttctctttgc | 120 |
| attctcgaga tcgcttagcc gcgctttaaa aaggtttgca tcagctgtga gtccatctga | 180 |
| caagcgagga aactaaggct gagaagtggg aggcgttgcc atctgcaggc ccaggcaacc | 240 |
| tgctacggga agaccgggga ccaagacctc tgggttggct ttcctagacc cgctcgggtc | 300 |
| ttcgggtgtc gcgaggaagg gccctgctcc tttcgttccc tgcacccctg gccgctgcag | 360 |
| gtggctccct ggaggaggag ctcccacgcg gaggaggagc cagggcagct gggagcgggg | 420 |
| acaccatcct cctggataag aggcagaggc cgggaggaac cccgtcagcc gggcgggcag | 480 |
| gaagctctgg gagtagcctc atggaagaga agcagatcct gtgcgtgggg ctagtggtgc | 540 |
| tggacgtcat cagcctggtg gacaagtacc ctaaggagga ctcggagata aggagcctgc | 600 |
| cagatgtgtc tgctacagac tttgagaagg ttgatctgac ccagttcaag tggatccaca | 660 |
| ttgagggccg gaacgcatcg gagcaggtga agatgctgca gcggatagac gcacacaaca | 720 |
| ccaggcagcc tccagagcag aagatccggg tgtccgtgga ggtggagaag ccacgagagg | 780 |
| agctcttcca gctgtttggc tacggagacg tggtgtttgt cagcaaagat gtggccaagc | 840 |
| acttggggtt ccagtcagca gaggaagcct tgaggggctt gtatggtcgt gtgaggaaag | 900 |
| gggctgtgct tgtctgtgcc tgggctgagg agggcgccga cgccctgggc cctgatggca | 960 |
| aattgctcca ctcggatgct ttcccgccac cccgcgtggt ggatacactg ggagctggag | 1020 |
| acaccttcaa tgcctccgtc atcttcagcc tctcccaggg gaggagcgtg caggaagcac | 1080 |
| tgagattcgg gtgccaggtg gccggcaaga agtgtggcct gcagggcttt gatggcatcg | 1140 |
| tgtgagagca ggtgccggct cctcacacac catggagact accattgcgg ctgcatcgcc | 1200 |
| ttctcccctc catccagcct ggcgtccagg ttgccctgtt caggggacag atgcaagctg | 1260 |
| tggggaggac tctgcctgtg tcctgtgttc cccacaggga gaggctctgg ggggatggct | 1320 |
| gggggatgca gagcctcaga gcaaataaat cttcctcaga gccagcttct cctctcaatg | 1380 |
| tctgaactgc tctggctggg cattcctgag gctctgactc ttcgatcctc cctctttgtg | 1440 |
| tccattcccc aaattaacct ctccgcccag gcccagagga ggggctgcct gggctagagc | 1500 |
| agcgagaagt gccctgggct tgccaccagc tctgccctgg ctggggagga cactcggtgc | 1560 |
| cccacaccca gtgaacctgc caaagaaacc gtgagagctc ttcggggccc tgcgttgtgc | 1620 |
| agactctatt cccacagctc agaagctggg agtccacacc gctgagctga actgacaggc | 1680 |
| cagtgggggg caggggtgcg cctcctctgc cctgcccacc agcctgtgat ttgatggggt | 1740 |
| cttcattgtc cagaaatacc tcctcccgct gactgcccca gagcctgaaa gtctcaccct | 1800 |
| tggagcccac cttggaatta agggcgtgcc tcagccacaa atgtgaccca ggatacagag | 1860 |
| tgttgctgtc ctcagggagg tccgatctgg aacacatatt ggaattgggg ccaactccaa | 1920 |
| tatagggtgg gtaaggcctt ataatgtaaa gagcatataa tgtaaagggc tttagagtga | 1980 |
| gacagacctg gattaaaatc tgccatttaa ttagctgcat atcaccttag ggtacagcac | 2040 |
| ttaacgcaat ctgcctcaat ttcttcatct gtcaaatgga accaattctg cttggctaca | 2100 |
| gaattattgt gaggataaaa tcatatataa aatgcccagc atga | 2144 |
| <210> 6 | |
| <211> 2144 | |
| <212> DNA | |
| <213> Homo sapiens | |
| <400> 6 | |
| tcatgctggg cattttatat atgattttat cctcacaata attctgtagc caagcagaat | 60 |
| tggttccatt tgacagatga agaaattgag gcagattgcg ttaagtgctg taccctaagg | 120 |
| tgatatgcag ctaattaaat ggcagatttt aatccaggtc tgtctcactc taaagccctt | 180 |
| tacattatat gctctttaca ttataaggcc ttacccaccc tatattggag ttggccccaa | 240 |
| ttccaatatg tgttccagat cggacctccc tgaggacagc aacactctgt atcctgggtc | 300 |
| acatttgtgg ctgaggcacg cccttaattc caaggtgggc tccaagggtg agactttcag | 360 |
| gctctggggc agtcagcggg aggaggtatt tctggacaat gaagacccca tcaaatcaca | 420 |
| ggctggtggg cagggcagag gaggcgcacc cctgcccccc actggcctgt cagttcagct | 480 |
| cagcggtgtg gactcccagc ttctgagctg tgggaataga gtctgcacaa cgcagggccc | 540 |
| cgaagagctc tcacggtttc tttggcaggt tcactgggtg tggggcaccg agtgtcctcc | 600 |
| ccagccaggg cagagctggt ggcaagccca gggcacttct cgctgctcta gcccaggcag | 660 |
| cccctcctct gggcctgggc ggagaggtta atttggggaa tggacacaaa gagggaggat | 720 |
| cgaagagtca gagcctcagg aatgcccagc cagagcagtt cagacattga gaggagaagc | 780 |
| tggctctgag gaagatttat ttgctctgag gctctgcatc ccccagccat ccccccagag | 840 |
| cctctccctg tggggaacac aggacacagg cagagtcctc cccacagctt gcatctgtcc | 900 |
| cctgaacagg gcaacctgga cgccaggctg gatggagggg agaaggcgat gcagccgcaa | 960 |
| tggtagtctc catggtgtgt gaggagccgg cacctgctct cacacgatgc catcaaagcc | 1020 |
| ctgcaggcca cacttcttgc cggccacctg gcacccgaat ctcagtgctt cctgcacgct | 1080 |
| cctcccctgg gagaggctga agatgacgga ggcattgaag gtgtctccag ctcccagtgt | 1140 |
| atccaccacg cggggtggcg ggaaagcatc cgagtggagc aatttgccat cagggcccag | 1200 |
| ggcgtcggcg ccctcctcag cccaggcaca gacaagcaca gcccctttcc tcacacgacc | 1260 |
| atacaagccc ctcaaggctt cctctgctga ctggaacccc aagtgcttgg ccacatcttt | 1320 |
| gctgacaaac accacgtctc cgtagccaaa cagctggaag agctcctctc gtggcttctc | 1380 |
| cacctccacg gacacccgga tcttctgctc tggaggctgc ctggtgttgt gtgcgtctat | 1440 |
| ccgctgcagc atcttcacct gctccgatgc gttccggccc tcaatgtgga tccacttgaa | 1500 |
| ctgggtcaga tcaaccttct caaagtctgt agcagacaca tctggcaggc tccttatctc | 1560 |
| cgagtcctcc ttagggtact tgtccaccag gctgatgacg tccagcacca ctagccccac | 1620 |
| gcacaggatc tgcttctctt ccatgaggct actcccagag cttcctgccc gcccggctga | 1680 |
| cggggttcct cccggcctct gcctcttatc caggaggatg gtgtccccgc tcccagctgc | 1740 |
| cctggctcct cctccgcgtg ggagctcctc ctccagggag ccacctgcag cggccagggg | 1800 |
| tgcagggaac gaaaggagca gggcccttcc tcgcgacacc cgaagacccg agcgggtcta | 1860 |
| ggaaagccaa cccagaggtc ttggtccccg gtcttcccgt agcaggttgc ctgggcctgc | 1920 |
| agatggcaac gcctcccact tctcagcctt agtttcctcg cttgtcagat ggactcacag | 1980 |
| ctgatgcaaa cctttttaaa gcgcggctaa gcgatctcga gaatgcaaag agaaaatgcg | 2040 |
| ctacttgccc cgcactctcc tgcacctgcg tctccgactc ccgacccggg acacgcgagg | 2100 |
| tacagctggg cctcgcatct gcagccctgc ctgaagcccg cggt | 2144 |
| <210> 7 | |
| <211> 1455 | |
| <212> DNA | |
| <213> Mus musculus | |
| <400> 7 | |
| gagggagaga acgcttgctt ctgtgctccg cctgcgaagg cgaagtttct gttgccagac | 60 |
| tgtgctagtc cgggtggtcc agggtctgca gcaggcgcag agggatcgga aaggcgatgc | 120 |
| attactagtg cgctttcgct ttgacagctg aggcggaaaa gtgagagggc ctgccattgg | 180 |
| ccgggctagg taacccaccc ttgcaaagca gaaagctccc tgcgggagga gttctgcacg | 240 |
| cagaggagga gccaaggtag ccagtgagaa gttgggacac ggtcctccag tagataagag | 300 |
| gcagagccca gcaggaaccc cctctgcttg cgggtaggaa gcttggggag cagcctcatg | 360 |
| gaagagaagc agatcctgtg cgtggggctg gtggtgctgg acatcatcaa tgtggtggac | 420 |
| aaatacccag aggaagacac ggatcgcagg tgcctgtccc agagatggca gcgtggaggc | 480 |
| aacgcatcca actcctgcac tgtcctttcc ttgcttggag cccgctgtgc cttcatgggc | 540 |
| tctttggccc ctggccacgt tgccgacttc ctggtggctg acttcaggca gaggggcgtg | 600 |
| gatgtgtctc aagtgacttg gcagagccag ggagataccc cttgctcttg ctgcatcgtc | 660 |
| aacaactcca atggctcccg taccattata ctctacgaca cgaacctgcc agatgtgtct | 720 |
| gctaaggact ttgagaaggt cgatctgacc cggttcaagt ggatccacat tgagggccgg | 780 |
| aatgcatcgg aacaggtgaa gatgctgcag cggatagagg agcacaatgc caagcagcct | 840 |
| ctgccacaga aggtccgggt gtcggtggag atagagaagc cccgtgagga gctcttccag | 900 |
| ttgtttagct atggtgaggt ggtgtttgtc agcaaagatg tggccaagca cctggggttc | 960 |
| cagtcagcag tggaggccct gaggggcttg tacagtcgag tgaagaaagg ggctacgctt | 1020 |
| gtctgtgcct gggctgagga gggtgccgat gccctgggcc ccgatggtca gctgctccac | 1080 |
| tcagatgcct tcccaccgcc ccgagtagta gacactcttg gggctggaga caccttcaat | 1140 |
| gcctctgtca tcttcagcct ctcgaaggga aacagcatgc aagaggccct gagattcggg | 1200 |
| tgccaggtgg ctggcaagaa gtgtggcttg caggggtttg atggcattgt gtgagaggca | 1260 |
| agcggcacca gctcgatacc tcagaggctg gcaccatgcc tgccactgcc ttctctactt | 1320 |
| cctccagctt agcatccagc tgccattccc cggcaggtgt gggatgtggg acagcctctg | 1380 |
| tctgtgtctg cgtctctgta tacctatctc ctctctgcag atacctggag caaataaatc | 1440 |
| ttcccctgag ccagc | 1455 |
| <210> 8 | |
| <211> 1455 | |
| <212> DNA | |
| <213> Mus musculus | |
| <400> 8 | |
| gctggctcag gggaagattt atttgctcca ggtatctgca gagaggagat aggtatacag | 60 |
| agacgcagac acagacagag gctgtcccac atcccacacc tgccggggaa tggcagctgg | 120 |
| atgctaagct ggaggaagta gagaaggcag tggcaggcat ggtgccagcc tctgaggtat | 180 |
| cgagctggtg ccgcttgcct ctcacacaat gccatcaaac ccctgcaagc cacacttctt | 240 |
| gccagccacc tggcacccga atctcagggc ctcttgcatg ctgtttccct tcgagaggct | 300 |
| gaagatgaca gaggcattga aggtgtctcc agccccaaga gtgtctacta ctcggggcgg | 360 |
| tgggaaggca tctgagtgga gcagctgacc atcggggccc agggcatcgg caccctcctc | 420 |
| agcccaggca cagacaagcg tagccccttt cttcactcga ctgtacaagc ccctcagggc | 480 |
| ctccactgct gactggaacc ccaggtgctt ggccacatct ttgctgacaa acaccacctc | 540 |
| accatagcta aacaactgga agagctcctc acggggcttc tctatctcca ccgacacccg | 600 |
| gaccttctgt ggcagaggct gcttggcatt gtgctcctct atccgctgca gcatcttcac | 660 |
| ctgttccgat gcattccggc cctcaatgtg gatccacttg aaccgggtca gatcgacctt | 720 |
| ctcaaagtcc ttagcagaca catctggcag gttcgtgtcg tagagtataa tggtacggga | 780 |
| gccattggag ttgttgacga tgcagcaaga gcaaggggta tctccctggc tctgccaagt | 840 |
| cacttgagac acatccacgc ccctctgcct gaagtcagcc accaggaagt cggcaacgtg | 900 |
| gccaggggcc aaagagccca tgaaggcaca gcgggctcca agcaaggaaa ggacagtgca | 960 |
| ggagttggat gcgttgcctc cacgctgcca tctctgggac aggcacctgc gatccgtgtc | 1020 |
| ttcctctggg tatttgtcca ccacattgat gatgtccagc accaccagcc ccacgcacag | 1080 |
| gatctgcttc tcttccatga ggctgctccc caagcttcct acccgcaagc agagggggtt | 1140 |
| cctgctgggc tctgcctctt atctactgga ggaccgtgtc ccaacttctc actggctacc | 1200 |
| ttggctcctc ctctgcgtgc agaactcctc ccgcagggag ctttctgctt tgcaagggtg | 1260 |
| ggttacctag cccggccaat ggcaggccct ctcacttttc cgcctcagct gtcaaagcga | 1320 |
| aagcgcacta gtaatgcatc gcctttccga tccctctgcg cctgctgcag accctggacc | 1380 |
| acccggacta gcacagtctg gcaacagaaa cttcgccttc gcaggcggag cacagaagca | 1440 |
| agcgttctct ccctc | 1455 |
| <210> 9 | |
| <211> 1307 | |
| <212> DNA | |
| <213> Rattus norvegicus | |
| <400> 9 | |
| gtgagagggt ctgccattgg ccggactagg taaccaaacc ctcgcaacag cagaaagcac | 60 |
| cctgcgggag gagctccgca ggcagaggag gagccagggt agcccctgag aagttgggac | 120 |
| acggtcctgc ggtagataag agacagagtc tagcaggaat cccctccgct tgcgggtagg | 180 |
| aagcttgggg agcagcctca tggaagagaa gcagatcctg tgcgtggggc tggtggtgct | 240 |
| ggacatcatc aatgtggtgg acaaataccc agaggaagac acggatcgca ggtgcctatc | 300 |
| ccagagatgg cagcgtggag gcaacgcgtc caactcctgc actgtgcttt ccttgctcgg | 360 |
| agcccgctgt gccttcatgg gctcgctggc ccatggccat gttgccgact tcctggtggc | 420 |
| cgacttcagg cggaggggtg tggatgtgtc tcaagtggcc tggcagagcc agggagatac | 480 |
| cccttgctcc tgctgcatcg tcaacaactc caatggctcc cgtaccatta ttctctacga | 540 |
| cacgaacctg ccagatgtgt ctgctaagga ctttgagaag gtcgatctga cccggttcaa | 600 |
| gtggatccac attgagggcc ggaatgcatc ggaacaggta aagatgctac agcggataga | 660 |
| acagtacaat gccacgcagc ctctgcagca gaaggtccgg gtgtccgtgg agatagagaa | 720 |
| gccccgagag gaactcttcc agctgttcgg ctatggagag gtggtgtttg tcagcaaaga | 780 |
| tgtggccaag cacctggggt tccggtcagc aggggaggcc ctgaagggct tgtacagtcg | 840 |
| tgtgaagaaa ggggctacgc tcatctgtgc ctgggctgag gagggagccg atgccctggg | 900 |
| ccccgacggc cagctgctcc actcagatgc cttcccacca ccccgagtag tagacactct | 960 |
| cggggctgga gacaccttca atgcctctgt catcttcagc ctctccaagg gaaacagcat | 1020 |
| gcaggaggcc ctgagattcg ggtgccaggt ggctggcaag aagtgtggct tgcaggggtt | 1080 |
| tgatggcatt gtgtgagaga tgagcggtgg gaggtagcag ctcgacacct cagaggctgg | 1140 |
| caccactgcc tgccattgcc ttcttcattt catccagcct ggcgtctggc tgcccagttc | 1200 |
| cctgggccag tgtaggctgt ggaacgggtc tttctgtctc ttctctgcag acacctggag | 1260 |
| caaataaatc ttcccctgag ccaaaaaaaa aaaaaaaaaa aaaaaaa | 1307 |
| <210> 10 | |
| <211> 1307 | |
| <212> DNA | |
| <213> Rattus norvegicus | |
| <400> 10 | |
| tttttttttt tttttttttt tttttggctc aggggaagat ttatttgctc caggtgtctg | 60 |
| cagagaagag acagaaagac ccgttccaca gcctacactg gcccagggaa ctgggcagcc | 120 |
| agacgccagg ctggatgaaa tgaagaaggc aatggcaggc agtggtgcca gcctctgagg | 180 |
| tgtcgagctg ctacctccca ccgctcatct ctcacacaat gccatcaaac ccctgcaagc | 240 |
| cacacttctt gccagccacc tggcacccga atctcagggc ctcctgcatg ctgtttccct | 300 |
| tggagaggct gaagatgaca gaggcattga aggtgtctcc agccccgaga gtgtctacta | 360 |
| ctcggggtgg tgggaaggca tctgagtgga gcagctggcc gtcggggccc agggcatcgg | 420 |
| ctccctcctc agcccaggca cagatgagcg tagccccttt cttcacacga ctgtacaagc | 480 |
| ccttcagggc ctcccctgct gaccggaacc ccaggtgctt ggccacatct ttgctgacaa | 540 |
| acaccacctc tccatagccg aacagctgga agagttcctc tcggggcttc tctatctcca | 600 |
| cggacacccg gaccttctgc tgcagaggct gcgtggcatt gtactgttct atccgctgta | 660 |
| gcatctttac ctgttccgat gcattccggc cctcaatgtg gatccacttg aaccgggtca | 720 |
| gatcgacctt ctcaaagtcc ttagcagaca catctggcag gttcgtgtcg tagagaataa | 780 |
| tggtacggga gccattggag ttgttgacga tgcagcagga gcaaggggta tctccctggc | 840 |
| tctgccaggc cacttgagac acatccacac ccctccgcct gaagtcggcc accaggaagt | 900 |
| cggcaacatg gccatgggcc agcgagccca tgaaggcaca gcgggctccg agcaaggaaa | 960 |
| gcacagtgca ggagttggac gcgttgcctc cacgctgcca tctctgggat aggcacctgc | 1020 |
| gatccgtgtc ttcctctggg tatttgtcca ccacattgat gatgtccagc accaccagcc | 1080 |
| ccacgcacag gatctgcttc tcttccatga ggctgctccc caagcttcct acccgcaagc | 1140 |
| ggaggggatt cctgctagac tctgtctctt atctaccgca ggaccgtgtc ccaacttctc | 1200 |
| aggggctacc ctggctcctc ctctgcctgc ggagctcctc ccgcagggtg ctttctgctg | 1260 |
| ttgcgagggt ttggttacct agtccggcca atggcagacc ctctcac | 1307 |
| <210> 11 | |
| <211> 1497 | |
| <212> DNA | |
| <213> Macaca fascicularis | |
| <400> 11 | |
| cccgggcggg gccgggcagc cgcgaccacg gtcttcaggc agggctgcag atgcaggccc | 60 |
| agctctacct cgcgggtcca gggtcgggag tccgagacgc aggtggctcc ccggaggagg | 120 |
| agctcccacg cggaggagga gccagggcag ctgggagcga ggacaccatc ctcctggata | 180 |
| acaggcagag gccgggagga acccgtcagt cgggcgggca ggaagctctg ggatcagcct | 240 |
| catggaagag aagcagatcc tgtgcgtggg gctagtggtg ctggacgtca tcagcctggt | 300 |
| ggacaagtac cctaaggagg actcagagat aaggtgcttg tcccagagat ggcaacgcgg | 360 |
| aggcaacgcg tccaactcct gcaccgttct ctccctgctc ggagccccct gtgccttcat | 420 |
| gggctcaatg gcccctggcc atgttgctga ttttgtcctg gatgacctcc gccgctattc | 480 |
| tgtggaccta cgctacacgg tctttcagac cacgggctcc gtccccatcg ccacggtcat | 540 |
| catcaacgag gccagtggta gccgcaccat cctatactac gacagcttcc tggtggccga | 600 |
| cttcaggcgg cggggtgtgg acgtgtctca ggtggcctgg cagagcaagg gggacacccc | 660 |
| cagctcctgc tgcatcatca acaactccaa tggcaaccgt accattgtgc tccatgacac | 720 |
| gagcctgcca gatgtgtctg ctacggactt tgagaaggtt gatctgaccc agttcaagtg | 780 |
| gatccacatt gagggccgga atgcatcgga gcaggtgaag atgctgcagc ggatagacgc | 840 |
| gcacaacacc aggcagcctc cagagcagaa gatccgggtg tccgtggagg tggagaagcc | 900 |
| acaagaggag ctctttcagc tgtttggcta cggagacgtg gtgtttgtca gcaaagatgt | 960 |
| ggccaagcac ttggggttcc agtcagcagg ggaagccctg aggggcttgt atggtcgtgt | 1020 |
| gaggaaaggg gctgtgcttg tctgtgcctg ggctgaggag ggcgccgacg ccctgggccc | 1080 |
| tgatggcaaa ctgatccact cggatgcttt cccgccaccc cgcgtggtgg ataccctggg | 1140 |
| ggctggagac accttcaatg cctccgtcat cttcagcctc tcccagggga ggagcgtgca | 1200 |
| ggaagcactg agattcggat gccaggtggc cggcaagaag tgtggccagc agggctttga | 1260 |
| tggcatcgtg tcagagccgg tgcggtagga ggtgccggct ccccgcacac tatggaggct | 1320 |
| gacattgcgg ctgcatcgcc ttctcccctc catccagcct ggcatccagg ttgccctgct | 1380 |
| caggggacag atgcaggctg tggggaggac tccgcctgtg tcctgtgttc cccacacgtc | 1440 |
| tctccctgca gagcctcaga gcgaataaat cttcctcgga gccagcttcc cctggca | 1497 |
| <210> 12 | |
| <211> 2256 | |
| <212> DNA | |
| <213> Macaca fascicularis | |
| <400> 12 | |
| atgttgggca ttatatatat tacatgattt tatcctcgca ataattctgt agccaggcag | 60 |
| aattggctcc atttgacaga tgaagaaatt gaggcggatt gtgttaagcg ctgtaccctc | 120 |
| aggtgacatg cagctaatta aatggcagat ttgaatctag gtctgtctga ctctaaagcc | 180 |
| ctttacctta tgtgctcttt acattataag gccttatcca ctctatattg gagttggccc | 240 |
| caattccaat atgtgttcca gatccgacct ccctgaggac aacactctat cttgggtcac | 300 |
| atttgtggct gaggcatccc cttaattcca aggtgggctc cacgggtgag actttcaggc | 360 |
| tctggggcag tcagcgggag gagatatttt tggacaacaa agacgccacc aaatcacagg | 420 |
| ctggtgggca gggcagagga ggcgccccac cccctcgccc cccactggcc tgtcagtttg | 480 |
| gctcagccgt gtggactccc agcttctgag ctatgggaat agagtctgca caacgcaggg | 540 |
| ccccaaagag ctctcatggc ttctggttct ttggcaggtt cgctgggtat ggggcactga | 600 |
| gtgtcctccc cagccagggc agagctggcg gcaagcctgg ggcacttctt gctgctatag | 660 |
| cccaggcagc ccctcctctg ggcctgggtg gagaggttaa tttggggaat gcacacgagg | 720 |
| agggaggact ggagagtcag agcctcagga atgcccagcc agagcagttc agacatcgag | 780 |
| gacagaagct gccaggggaa gctggctccg aggaagattt attcgctctg aggctctgca | 840 |
| gggagagacg tgtggggaac acaggacaca ggcggagtcc tccccacagc ctgcatctgt | 900 |
| cccctgagca gggcaacctg gatgccaggc tggatggagg ggagaaggcg atgcagccgc | 960 |
| aatgtcagcc tccatagtgt gcggggagcc ggcacctcct accgcaccgg ctctgacacg | 1020 |
| atgccatcaa agccctgctg gccacacttc ttgccggcca cctggcatcc gaatctcagt | 1080 |
| gcttcctgca cgctcctccc ctgggagagg ctgaagatga cggaggcatt gaaggtgtct | 1140 |
| ccagccccca gggtatccac cacgcggggt ggcgggaaag catccgagtg gatcagtttg | 1200 |
| ccatcagggc ccagggcgtc ggcgccctcc tcagcccagg cacagacaag cacagcccct | 1260 |
| ttcctcacac gaccatacaa gcccctcagg gcttcccctg ctgactggaa ccccaagtgc | 1320 |
| ttggccacat ctttgctgac aaacaccacg tctccgtagc caaacagctg aaagagctcc | 1380 |
| tcttgtggct tctccacctc cacggacacc cggatcttct gctctggagg ctgcctggtg | 1440 |
| ttgtgcgcgt ctatccgctg cagcatcttc acctgctccg atgcattccg gccctcaatg | 1500 |
| tggatccact tgaactgggt cagatcaacc ttctcaaagt ccgtagcaga cacatctggc | 1560 |
| aggctcgtgt catggagcac aatggtacgg ttgccattgg agttgttgat gatgcagcag | 1620 |
| gagctggggg tgtccccctt gctctgccag gccacctgag acacgtccac accccgccgc | 1680 |
| ctgaagtcgg ccaccaggaa gctgtcgtag tataggatgg tgcggctacc actggcctcg | 1740 |
| ttgatgatga ccgtggcgat ggggacggag cccgtggtct gaaagaccgt gtagcgtagg | 1800 |
| tccacagaat agcggcggag gtcatccagg acaaaatcag caacatggcc aggggccatt | 1860 |
| gagcccatga aggcacaggg ggctccgagc agggagagaa cggtgcagga gttggacgcg | 1920 |
| ttgcctccgc gttgccatct ctgggacaag caccttatct ctgagtcctc cttagggtac | 1980 |
| ttgtccacca ggctgatgac gtccagcacc actagcccca cgcacaggat ctgcttctct | 2040 |
| tccatgaggc tgatcccaga gcttcctgcc cgcccgactg acgggttcct cccggcctct | 2100 |
| gcctgttatc caggaggatg gtgtcctcgc tcccagctgc cctggctcct cctccgcgtg | 2160 |
| ggagctcctc ctccggggag ccacctgcgt ctcggactcc cgaccctgga cccgcgaggt | 2220 |
| agagctgggc ctgcatctgc agccctgcct gaagac | 2256 |

### EQUIVALENTS

[0599] Those skilled in the art will recognize, or be able to ascertain using no more than routine experimentation, many equivalents to the specific embodiments and methods described herein. Such equivalents are intended to be encompassed by the scope of the following claims.

1. A double stranded ribonucleic acid (dsRNA) agent for inhibiting expression of a ketohexokinase (KHK) gene,
wherein the dsRNA agent comprises a sense strand and an antisense strand forming a double stranded region,
wherein the sense strand comprises at least 15 contiguous nucleotides differing by no more than 3 nucleotides from the nucleotide sequence of any one of nucleotides 89-107, 176-194, 264-282, 474-492, 508-526, 529-547, 562-580, 616-646, 682-700, 705-723, 705-757, 705-799, 739-757, 739-799, 760-799, 804-822, 837-855, 892-910, 959-977, 992-1010, 922-1041, 1013-1041, 1069-1108, 1169-1140, 1111-1140, 1155-1196, 1221-1261, 1267-1294, or 1320-1350 of SEQ ID NO:1, and the antisense strand comprises at least 15 contiguous nucleotides differing by no more than 3 nucleotides from the nucleotide sequence of SEQ ID NO:2.

2.-4. (canceled)

5. The dsRNA agent of claim 1, wherein the dsRNA comprises at least one modified nucleotide.

6. (canceled)

7. A double stranded ribonucleic acid (dsRNA) agent for inhibiting expression of a ketohexokinase (KHK) gene,
wherein the dsRNA agent comprises a sense strand and an antisense strand forming a double stranded region,
wherein the sense strand comprises at least 15 contiguous nucleotides differing by no more than 3 nucleotides from the nucleotide sequence of any one of nucleotides 89-107, 176-194, 264-282, 474-492, 508-526, 529-547, 562-580, 616-646, 682-700, 705-723, 705-757, 705-799, 739-757, 739-799, 760-799, 804-822, 837-855, 892-910, 959-977, 992-1010, 922-1041, 1013-1041, 1069-1108, 1169-1140, 1111-1140, 1155-1196, 1221-1261, 1267-1294, or 1320-1350 of SEQ ID NO:1 and the antisense strand comprises at least 15 contiguous nucleotides differing by no more than 3 nucleotides from the nucleotide sequence of SEQ ID NO:2,
wherein all of the nucleotides of the sense strand and all of the nucleotides of the antisense strand are modified nucleotides, and
wherein the sense strand is conjugated to a ligand attached at the 3′-terminus.

8. (canceled)

9. The dsRNA agent of claim 7, wherein at least one of the modified nucleotides is selected from the group consisting of a deoxy-nucleotide, a 3′-terminal deoxy-thymine (dT) nucleotide, a 2′-O-methyl modified nucleotide, a 2′-fluoro modified nucleotide, a 2′-deoxy-modified nucleotide, a locked nucleotide, an unlocked nucleotide, a conformationally restricted nucleotide, a constrained ethyl nucleotide, an abasic nucleotide, a 2′-amino-modified nucleotide, a 2′-O-allyl-modified nucleotide, 2′-C-alkyl-modified nucleotide, 2′-hydroxly-modified nucleotide, a 2′-methoxyethyl modified nucleotide, a 2′-O-alkyl-modified nucleotide, a morpholino nucleotide, a phosphoramidate, a non-natural base comprising nucleotide, a tetrahydropyran modified nucleotide, a 1,5-anhydrohexitol modified nucleotide, a cyclohexenyl modified nucleotide, a nucleotide comprising a phosphorothioate group, a nucleotide comprising a methylphosphonate group, a nucleotide comprising a 5′-phosphate, and a nucleotide comprising a 5′-phosphate mimic.

10.-13. (canceled)

14. The dsRNA agent of claim 1, wherein each strand is no more than 30 nucleotides in length.

15. The dsRNA agent of claim 1, wherein at least one strand comprises a 3′ overhang of at least 1 nucleotide.

16. (canceled)

17. The dsRNA agent of claim 1, further comprising a ligand.

18. The dsRNA agent of claim 17, wherein the ligand is conjugated to the 3′ end of the sense strand of the dsRNA agent.

19. The dsRNA agent of claim 17, wherein the ligand is an N-acetylgalactosamine (GalNAc) derivative.

20. The dsRNA agent of claim 19, wherein the ligand is

[chemical structure]

21. The dsRNA agent of claim 19, wherein the dsRNA agent is conjugated to the ligand as shown in the following schematic [chemical structure]
and, wherein X is O or S.

22. The dsRNA agent of claim 21, wherein the X is O.

23.-35. (canceled)

36. The dsRNA agent of claim 1, wherein the double stranded region is 15-30 nucleotide pairs in length.

37.-41. (canceled)

42.-45. (canceled)

46. The dsRNA agent of claim 17, wherein the ligand is one or more GalNAc derivatives attached through a monovalent, a bivalent or a trivalent branched linker.

47.-49. (canceled)

50. The dsRNA agent of claim 1, wherein the agent further comprises at least one phosphorothioate or methylphosphonate internucleotide linkage.

51.-75. (canceled)

76. A double stranded ribonucleic acid (dsRNA) agent for inhibiting the expression of a ketohexokinase (KHK) gene in a cell,
wherein the dsRNA agent comprises a sense strand and an antisense strand forming a double stranded region,
wherein the sense strand comprises at least 15 contiguous nucleotides differing by no more than 3 nucleotides from the nucleotide sequence of any one of nucleotides 89-107, 176-194, 264-282, 474-492, 508-526, 529-547, 562-580, 616-646, 682-700, 705-723, 705-757, 705-799, 739-757, 739-799, 760-799, 804-822, 837-855, 892-910, 959-977, 992-1010, 922-1041, 1013-1041, 1069-1108, 1169-1140, 1111-1140, 1155-1196, 1221-1261, 1267-1294, or 1320-1350 of the nucleotide sequence of SEQ ID NO:1 and the antisense strand comprises at least 15 contiguous nucleotides differing by no more than 3 nucleotides from the corresponding nucleotide sequence of SEQ ID NO:2,
wherein substantially all of the nucleotides of the sense strand comprise a modification selected from the group consisting of a 2′-O-methyl modification and a 2′-fluoro modification, wherein the sense strand comprises two phosphorothioate internucleotide linkages at the 5′-terminus,
wherein substantially all of the nucleotides of the antisense strand comprise a modification selected from the group consisting of a 2′-O-methyl modification and a 2′-fluoro modification,
wherein the antisense strand comprises two phosphorothioate internucleotide linkages at the 5′-terminus and two phosphorothioate internucleotide linkages at the 3′-terminus, and
wherein the sense strand is conjugated to one or more GalNAc derivatives attached through a monovalent, a bivalent or a trivalent branched linker at the 3′-terminus.

77. (canceled)

78. (canceled)

79. An isolated cell containing the dsRNA agent of claim 1.

80. A pharmaceutical composition for inhibiting expression of a ketohexokinase (KHK) gene comprising the dsRNA agent of claim 1.

81. (canceled)

82. (canceled)

83. A method of inhibiting expression of a ketohexokinase (KHK) gene in a cell, the method comprising:
(a) contacting the cell with the double stranded RNAi agent of claim 1; and
(b) maintaining the cell produced in step (a) for a time sufficient to obtain degradation of the mRNA transcript of the KHK gene, thereby inhibiting expression of the KHK gene in the cell.

84.-86. (canceled)

87. A method of treating a subject having a disease or disorder that would benefit from reduction in expression of ketohexokinase (KHK), the method comprising administering to the subject a therapeutically effective amount of the dsRNA agent of claim 1, thereby treating the subject.

88. (canceled)

89. (canceled)

90. The method of claim 87, wherein the disorder is a KHK-associated disease.

91.-102. (canceled)

103. The method of claim 87, wherein the subject is human.

104. (canceled)

105. The method of claim 87, further comprising administering an agent for the treatment of a KHK-associated disease.

106.-111. (canceled)

The application's sequence listing, which the Patent Office published only in electronic form, follows.

SEQUENCE LISTING (926 sequences)

SEQ ID NO: 1 - DNA, 2433 bp, Homo sapiens
  source 1..2433: mol_type = genomic DNA
ggggcggggccgccgcgaccgcgggcttcaggcagggctgcagatgcgaggcccagctgtacctcgcgtgtcccgggtcgggagtcggagacgcaggtgcaggagagtgcggggcaagtagcgcattttctctttgcattctcgagatcgcttagccgcgctttaaaaaggtttgcatcagctgtgagtccatctgacaagcgaggaaactaaggctgagaagtgggaggcgttgccatctgcaggcccaggcaacctgctacgggaagaccggggaccaagacctctgggttggctttcctagacccgctcgggtcttcgggtgtcgcgaggaagggccctgctcctttcgttccctgcacccctggccgctgcaggtggctccctggaggaggagctcccacgcggaggaggagccagggcagctgggagcggggacaccatcctcctggataagaggcagaggccgggaggaaccccgtcagccgggcgggcaggaagctctgggagtagcctcatggaagagaagcagatcctgtgcgtggggctagtggtgctggacgtcatcagcctggtggacaagtaccctaaggaggactcggagataaggtgtttgtcccagagatggcagcgcggaggcaacgcgtccaactcctgcaccgttctctccctgctcggagccccctgtgccttcatgggctcaatggctcctggccatgttgctgacttcctggtggccgacttcaggcggcggggcgtggacgtgtctcaggtggcctggcagagcaagggggacacccccagctcctgctgcatcatcaacaactccaatggcaaccgtaccattgtgctccatgacacgagcctgccagatgtgtctgctacagactttgagaaggttgatctgacccagttcaagtggatccacattgagggccggaacgcatcggagcaggtgaagatgctgcagcggatagacgcacacaacaccaggcagcctccagagcagaagatccgggtgtccgtggaggtggagaagccacgagaggagctcttccagctgtttggctacggagacgtggtgtttgtcagcaaagatgtggccaagcacttggggttccagtcagcagaggaagccttgaggggcttgtatggtcgtgtgaggaaaggggctgtgcttgtctgtgcctgggctgaggagggcgccgacgccctgggccctgatggcaaattgctccactcggatgctttcccgccaccccgcgtggtggatacactgggagctggagacaccttcaatgcctccgtcatcttcagcctctcccaggggaggagcgtgcaggaagcactgagattcgggtgccaggtggccggcaagaagtgtggcctgcagggctttgatggcatcgtgtgagagcaggtgccggctcctcacacaccatggagactaccattgcggctgcatcgccttctcccctccatccagcctggcgtccaggttgccctgttcaggggacagatgcaagctgtggggaggactctgcctgtgtcctgtgttccccacagggagaggctctggggggatggctgggggatgcagagcctcagagcaaataaatcttcctcagagccagcttctcctctcaatgtctgaactgctctggctgggcattcctgaggctctgactcttcgatcctccctctttgtgtccattccccaaattaacctctccgcccaggcccagaggaggggctgcctgggctagagcagcgagaagtgccctgggcttgccaccagctctgccctggctggggaggacactcggtgccccacacccagtgaacctgccaaagaaaccgtgagagctcttcggggccctgcgttgtgcagactctattcccacagctcagaagctgggagtccacaccgctgagctgaactgacaggccagtggggggcaggggtgcgcctcctctgccctgcccaccagcctgtgatttgatggggtcttcattgtccagaaatacctcctcccgctgactgccccagagcctgaaagtctcacccttggagcccaccttggaattaagggcgtgcctcagccacaaatgtgacccaggatacagagtgttgctgtcctcagggaggtccgatctggaacacatattggaattggggccaactccaatatagggtgggtaaggccttataatgtaaagagcatataatgtaaagggctttagagtgagacagacctggattcaaatctgccatttaattagctgcatatcaccttagggtacagcacttaacgcaatctgcctcaatttcttcatctgtcaaatggaaccaattctgcttggctacagaattattgtgaggataaaatcatatataaaatgcccagcatgatgaaaaaaaaaaaaaaaaaa

SEQ ID NO: 2 - DNA, 2433 bp, Homo sapiens
  source 1..2433: mol_type = genomic DNA
ttttttttttttttttttcatcatgctgggcattttatatatgattttatcctcacaataattctgtagccaagcagaattggttccatttgacagatgaagaaattgaggcagattgcgttaagtgctgtaccctaaggtgatatgcagctaattaaatggcagatttgaatccaggtctgtctcactctaaagccctttacattatatgctctttacattataaggccttacccaccctatattggagttggccccaattccaatatgtgttccagatcggacctccctgaggacagcaacactctgtatcctgggtcacatttgtggctgaggcacgcccttaattccaaggtgggctccaagggtgagactttcaggctctggggcagtcagcgggaggaggtatttctggacaatgaagaccccatcaaatcacaggctggtgggcagggcagaggaggcgcacccctgccccccactggcctgtcagttcagctcagcggtgtggactcccagcttctgagctgtgggaatagagtctgcacaacgcagggccccgaagagctctcacggtttctttggcaggttcactgggtgtggggcaccgagtgtcctccccagccagggcagagctggtggcaagcccagggcacttctcgctgctctagcccaggcagcccctcctctgggcctgggcggagaggttaatttggggaatggacacaaagagggaggatcgaagagtcagagcctcaggaatgcccagccagagcagttcagacattgagaggagaagctggctctgaggaagatttatttgctctgaggctctgcatcccccagccatccccccagagcctctccctgtggggaacacaggacacaggcagagtcctccccacagcttgcatctgtcccctgaacagggcaacctggacgccaggctggatggaggggagaaggcgatgcagccgcaatggtagtctccatggtgtgtgaggagccggcacctgctctcacacgatgccatcaaagccctgcaggccacacttcttgccggccacctggcacccgaatctcagtgcttcctgcacgctcctcccctgggagaggctgaagatgacggaggcattgaaggtgtctccagctcccagtgtatccaccacgcggggtggcgggaaagcatccgagtggagcaatttgccatcagggcccagggcgtcggcgccctcctcagcccaggcacagacaagcacagcccctttcctcacacgaccatacaagcccctcaaggcttcctctgctgactggaaccccaagtgcttggccacatctttgctgacaaacaccacgtctccgtagccaaacagctggaagagctcctctcgtggcttctccacctccacggacacccggatcttctgctctggaggctgcctggtgttgtgtgcgtctatccgctgcagcatcttcacctgctccgatgcgttccggccctcaatgtggatccacttgaactgggtcagatcaaccttctcaaagtctgtagcagacacatctggcaggctcgtgtcatggagcacaatggtacggttgccattggagttgttgatgatgcagcaggagctgggggtgtcccccttgctctgccaggccacctgagacacgtccacgccccgccgcctgaagtcggccaccaggaagtcagcaacatggccaggagccattgagcccatgaaggcacagggggctccgagcagggagagaacggtgcaggagttggacgcgttgcctccgcgctgccatctctgggacaaacaccttatctccgagtcctccttagggtacttgtccaccaggctgatgacgtccagcaccactagccccacgcacaggatctgcttctcttccatgaggctactcccagagcttcctgcccgcccggctgacggggttcctcccggcctctgcctcttatccaggaggatggtgtccccgctcccagctgccctggctcctcctccgcgtgggagctcctcctccagggagccacctgcagcggccaggggtgcagggaacgaaaggagcagggcccttcctcgcgacacccgaagacccgagcgggtctaggaaagccaacccagaggtcttggtccccggtcttcccgtagcaggttgcctgggcctgcagatggcaacgcctcccacttctcagccttagtttcctcgcttgtcagatggactcacagctgatgcaaacctttttaaagcgcggctaagcgatctcgagaatgcaaagagaaaatgcgctacttgccccgcactctcctgcacctgcgtctccgactcccgacccgggacacgcgaggtacagctgggcctcgcatctgcagccctgcctgaagcccgcggtcgcggcggccccgcccc

SEQ ID NO: 3 - DNA, 2433 bp, Homo sapiens
  source 1..2433: mol_type = genomic DNA
ggggcggggccgccgcgaccgcgggcttcaggcagggctgcagatgcgaggcccagctgtacctcgcgtgtcccgggtcgggagtcggagacgcaggtgcaggagagtgcggggcaagtagcgcattttctctttgcattctcgagatcgcttagccgcgctttaaaaaggtttgcatcagctgtgagtccatctgacaagcgaggaaactaaggctgagaagtgggaggcgttgccatctgcaggcccaggcaacctgctacgggaagaccggggaccaagacctctgggttggctttcctagacccgctcgggtcttcgggtgtcgcgaggaagggccctgctcctttcgttccctgcacccctggccgctgcaggtggctccctggaggaggagctcccacgcggaggaggagccagggcagctgggagcggggacaccatcctcctggataagaggcagaggccgggaggaaccccgtcagccgggcgggcaggaagctctgggagtagcctcatggaagagaagcagatcctgtgcgtggggctagtggtgctggacgtcatcagcctggtggacaagtaccctaaggaggactcggagataaggtgtttgtcccagagatggcagcgcggaggcaacgcgtccaactcctgcaccgttctctccctgctcggagccccctgtgccttcatgggctcaatggctcctggccatgttgctgattttgtcctggatgacctccgccgctattctgtggacctacgctacacagtctttcagaccacaggctccgtccccatcgccacggtcatcatcaacgaggccagtggtagccgcaccatcctatactatgacaggagcctgccagatgtgtctgctacagactttgagaaggttgatctgacccagttcaagtggatccacattgagggccggaacgcatcggagcaggtgaagatgctgcagcggatagacgcacacaacaccaggcagcctccagagcagaagatccgggtgtccgtggaggtggagaagccacgagaggagctcttccagctgtttggctacggagacgtggtgtttgtcagcaaagatgtggccaagcacttggggttccagtcagcagaggaagccttgaggggcttgtatggtcgtgtgaggaaaggggctgtgcttgtctgtgcctgggctgaggagggcgccgacgccctgggccctgatggcaaattgctccactcggatgctttcccgccaccccgcgtggtggatacactgggagctggagacaccttcaatgcctccgtcatcttcagcctctcccaggggaggagcgtgcaggaagcactgagattcgggtgccaggtggccggcaagaagtgtggcctgcagggctttgatggcatcgtgtgagagcaggtgccggctcctcacacaccatggagactaccattgcggctgcatcgccttctcccctccatccagcctggcgtccaggttgccctgttcaggggacagatgcaagctgtggggaggactctgcctgtgtcctgtgttccccacagggagaggctctggggggatggctgggggatgcagagcctcagagcaaataaatcttcctcagagccagcttctcctctcaatgtctgaactgctctggctgggcattcctgaggctctgactcttcgatcctccctctttgtgtccattccccaaattaacctctccgcccaggcccagaggaggggctgcctgggctagagcagcgagaagtgccctgggcttgccaccagctctgccctggctggggaggacactcggtgccccacacccagtgaacctgccaaagaaaccgtgagagctcttcggggccctgcgttgtgcagactctattcccacagctcagaagctgggagtccacaccgctgagctgaactgacaggccagtggggggcaggggtgcgcctcctctgccctgcccaccagcctgtgatttgatggggtcttcattgtccagaaatacctcctcccgctgactgccccagagcctgaaagtctcacccttggagcccaccttggaattaagggcgtgcctcagccacaaatgtgacccaggatacagagtgttgctgtcctcagggaggtccgatctggaacacatattggaattggggccaactccaatatagggtgggtaaggccttataatgtaaagagcatataatgtaaagggctttagagtgagacagacctggattcaaatctgccatttaattagctgcatatcaccttagggtacagcacttaacgcaatctgcctcaatttcttcatctgtcaaatggaaccaattctgcttggctacagaattattgtgaggataaaatcatatataaaatgcccagcatgatgaaaaaaaaaaaaaaaaaa

SEQ ID NO: 4 - DNA, 2433 bp, Homo sapiens
  source 1..2433: mol_type = genomic DNA
ttttttttttttttttttcatcatgctgggcattttatatatgattttatcctcacaataattctgtagccaagcagaattggttccatttgacagatgaagaaattgaggcagattgcgttaagtgctgtaccctaaggtgatatgcagctaattaaatggcagatttgaatccaggtctgtctcactctaaagccctttacattatatgctctttacattataaggccttacccaccctatattggagttggccccaattccaatatgtgttccagatcggacctccctgaggacagcaacactctgtatcctgggtcacatttgtggctgaggcacgcccttaattccaaggtgggctccaagggtgagactttcaggctctggggcagtcagcgggaggaggtatttctggacaatgaagaccccatcaaatcacaggctggtgggcagggcagaggaggcgcacccctgccccccactggcctgtcagttcagctcagcggtgtggactcccagcttctgagctgtgggaatagagtctgcacaacgcagggccccgaagagctctcacggtttctttggcaggttcactgggtgtggggcaccgagtgtcctccccagccagggcagagctggtggcaagcccagggcacttctcgctgctctagcccaggcagcccctcctctgggcctgggcggagaggttaatttggggaatggacacaaagagggaggatcgaagagtcagagcctcaggaatgcccagccagagcagttcagacattgagaggagaagctggctctgaggaagatttatttgctctgaggctctgcatcccccagccatccccccagagcctctccctgtggggaacacaggacacaggcagagtcctccccacagcttgcatctgtcccctgaacagggcaacctggacgccaggctggatggaggggagaaggcgatgcagccgcaatggtagtctccatggtgtgtgaggagccggcacctgctctcacacgatgccatcaaagccctgcaggccacacttcttgccggccacctggcacccgaatctcagtgcttcctgcacgctcctcccctgggagaggctgaagatgacggaggcattgaaggtgtctccagctcccagtgtatccaccacgcggggtggcgggaaagcatccgagtggagcaatttgccatcagggcccagggcgtcggcgccctcctcagcccaggcacagacaagcacagcccctttcctcacacgaccatacaagcccctcaaggcttcctctgctgactggaaccccaagtgcttggccacatctttgctgacaaacaccacgtctccgtagccaaacagctggaagagctcctctcgtggcttctccacctccacggacacccggatcttctgctctggaggctgcctggtgttgtgtgcgtctatccgctgcagcatcttcacctgctccgatgcgttccggccctcaatgtggatccacttgaactgggtcagatcaaccttctcaaagtctgtagcagacacatctggcaggctcctgtcatagtataggatggtgcggctaccactggcctcgttgatgatgaccgtggcgatggggacggagcctgtggtctgaaagactgtgtagcgtaggtccacagaatagcggcggaggtcatccaggacaaaatcagcaacatggccaggagccattgagcccatgaaggcacagggggctccgagcagggagagaacggtgcaggagttggacgcgttgcctccgcgctgccatctctgggacaaacaccttatctccgagtcctccttagggtacttgtccaccaggctgatgacgtccagcaccactagccccacgcacaggatctgcttctcttccatgaggctactcccagagcttcctgcccgcccggctgacggggttcctcccggcctctgcctcttatccaggaggatggtgtccccgctcccagctgccctggctcctcctccgcgtgggagctcctcctccagggagccacctgcagcggccaggggtgcagggaacgaaaggagcagggcccttcctcgcgacacccgaagacccgagcgggtctaggaaagccaacccagaggtcttggtccccggtcttcccgtagcaggttgcctgggcctgcagatggcaacgcctcccacttctcagccttagtttcctcgcttgtcagatggactcacagctgatgcaaacctttttaaagcgcggctaagcgatctcgagaatgcaaagagaaaatgcgctacttgccccgcactctcctgcacctgcgtctccgactcccgacccgggacacgcgaggtacagctgggcctcgcatctgcagccctgcctgaagcccgcggtcgcggcggccccgcccc

SEQ ID NO: 5 - DNA, 2144 bp, Homo sapiens
  source 1..2144: mol_type = genomic DNA
accgcgggcttcaggcagggctgcagatgcgaggcccagctgtacctcgcgtgtcccgggtcgggagtcggagacgcaggtgcaggagagtgcggggcaagtagcgcattttctctttgcattctcgagatcgcttagccgcgctttaaaaaggtttgcatcagctgtgagtccatctgacaagcgaggaaactaaggctgagaagtgggaggcgttgccatctgcaggcccaggcaacctgctacgggaagaccggggaccaagacctctgggttggctttcctagacccgctcgggtcttcgggtgtcgcgaggaagggccctgctcctttcgttccctgcacccctggccgctgcaggtggctccctggaggaggagctcccacgcggaggaggagccagggcagctgggagcggggacaccatcctcctggataagaggcagaggccgggaggaaccccgtcagccgggcgggcaggaagctctgggagtagcctcatggaagagaagcagatcctgtgcgtggggctagtggtgctggacgtcatcagcctggtggacaagtaccctaaggaggactcggagataaggagcctgccagatgtgtctgctacagactttgagaaggttgatctgacccagttcaagtggatccacattgagggccggaacgcatcggagcaggtgaagatgctgcagcggatagacgcacacaacaccaggcagcctccagagcagaagatccgggtgtccgtggaggtggagaagccacgagaggagctcttccagctgtttggctacggagacgtggtgtttgtcagcaaagatgtggccaagcacttggggttccagtcagcagaggaagccttgaggggcttgtatggtcgtgtgaggaaaggggctgtgcttgtctgtgcctgggctgaggagggcgccgacgccctgggccctgatggcaaattgctccactcggatgctttcccgccaccccgcgtggtggatacactgggagctggagacaccttcaatgcctccgtcatcttcagcctctcccaggggaggagcgtgcaggaagcactgagattcgggtgccaggtggccggcaagaagtgtggcctgcagggctttgatggcatcgtgtgagagcaggtgccggctcctcacacaccatggagactaccattgcggctgcatcgccttctcccctccatccagcctggcgtccaggttgccctgttcaggggacagatgcaagctgtggggaggactctgcctgtgtcctgtgttccccacagggagaggctctggggggatggctgggggatgcagagcctcagagcaaataaatcttcctcagagccagcttctcctctcaatgtctgaactgctctggctgggcattcctgaggctctgactcttcgatcctccctctttgtgtccattccccaaattaacctctccgcccaggcccagaggaggggctgcctgggctagagcagcgagaagtgccctgggcttgccaccagctctgccctggctggggaggacactcggtgccccacacccagtgaacctgccaaagaaaccgtgagagctcttcggggccctgcgttgtgcagactctattcccacagctcagaagctgggagtccacaccgctgagctgaactgacaggccagtggggggcaggggtgcgcctcctctgccctgcccaccagcctgtgatttgatggggtcttcattgtccagaaatacctcctcccgctgactgccccagagcctgaaagtctcacccttggagcccaccttggaattaagggcgtgcctcagccacaaatgtgacccaggatacagagtgttgctgtcctcagggaggtccgatctggaacacatattggaattggggccaactccaatatagggtgggtaaggccttataatgtaaagagcatataatgtaaagggctttagagtgagacagacctggattaaaatctgccatttaattagctgcatatcaccttagggtacagcacttaacgcaatctgcctcaatttcttcatctgtcaaatggaaccaattctgcttggctacagaattattgtgaggataaaatcatatataaaatgcccagcatga

SEQ ID NO: 6 - DNA, 2144 bp, Homo sapiens
  source 1..2144: mol_type = genomic DNA
tcatgctgggcattttatatatgattttatcctcacaataattctgtagccaagcagaattggttccatttgacagatgaagaaattgaggcagattgcgttaagtgctgtaccctaaggtgatatgcagctaattaaatggcagattttaatccaggtctgtctcactctaaagccctttacattatatgctctttacattataaggccttacccaccctatattggagttggccccaattccaatatgtgttccagatcggacctccctgaggacagcaacactctgtatcctgggtcacatttgtggctgaggcacgcccttaattccaaggtgggctccaagggtgagactttcaggctctggggcagtcagcgggaggaggtatttctggacaatgaagaccccatcaaatcacaggctggtgggcagggcagaggaggcgcacccctgccccccactggcctgtcagttcagctcagcggtgtggactcccagcttctgagctgtgggaatagagtctgcacaacgcagggccccgaagagctctcacggtttctttggcaggttcactgggtgtggggcaccgagtgtcctccccagccagggcagagctggtggcaagcccagggcacttctcgctgctctagcccaggcagcccctcctctgggcctgggcggagaggttaatttggggaatggacacaaagagggaggatcgaagagtcagagcctcaggaatgcccagccagagcagttcagacattgagaggagaagctggctctgaggaagatttatttgctctgaggctctgcatcccccagccatccccccagagcctctccctgtggggaacacaggacacaggcagagtcctccccacagcttgcatctgtcccctgaacagggcaacctggacgccaggctggatggaggggagaaggcgatgcagccgcaatggtagtctccatggtgtgtgaggagccggcacctgctctcacacgatgccatcaaagccctgcaggccacacttcttgccggccacctggcacccgaatctcagtgcttcctgcacgctcctcccctgggagaggctgaagatgacggaggcattgaaggtgtctccagctcccagtgtatccaccacgcggggtggcgggaaagcatccgagtggagcaatttgccatcagggcccagggcgtcggcgccctcctcagcccaggcacagacaagcacagcccctttcctcacacgaccatacaagcccctcaaggcttcctctgctgactggaaccccaagtgcttggccacatctttgctgacaaacaccacgtctccgtagccaaacagctggaagagctcctctcgtggcttctccacctccacggacacccggatcttctgctctggaggctgcctggtgttgtgtgcgtctatccgctgcagcatcttcacctgctccgatgcgttccggccctcaatgtggatccacttgaactgggtcagatcaaccttctcaaagtctgtagcagacacatctggcaggctccttatctccgagtcctccttagggtacttgtccaccaggctgatgacgtccagcaccactagccccacgcacaggatctgcttctcttccatgaggctactcccagagcttcctgcccgcccggctgacggggttcctcccggcctctgcctcttatccaggaggatggtgtccccgctcccagctgccctggctcctcctccgcgtgggagctcctcctccagggagccacctgcagcggccaggggtgcagggaacgaaaggagcagggcccttcctcgcgacacccgaagacccgagcgggtctaggaaagccaacccagaggtcttggtccccggtcttcccgtagcaggttgcctgggcctgcagatggcaacgcctcccacttctcagccttagtttcctcgcttgtcagatggactcacagctgatgcaaacctttttaaagcgcggctaagcgatctcgagaatgcaaagagaaaatgcgctacttgccccgcactctcctgcacctgcgtctccgactcccgacccgggacacgcgaggtacagctgggcctcgcatctgcagccctgcctgaagcccgcggt

SEQ ID NO: 7 - DNA, 1455 bp, Mus musculus
  source 1..1455: mol_type = genomic DNA
gagggagagaacgcttgcttctgtgctccgcctgcgaaggcgaagtttctgttgccagactgtgctagtccgggtggtccagggtctgcagcaggcgcagagggatcggaaaggcgatgcattactagtgcgctttcgctttgacagctgaggcggaaaagtgagagggcctgccattggccgggctaggtaacccacccttgcaaagcagaaagctccctgcgggaggagttctgcacgcagaggaggagccaaggtagccagtgagaagttgggacacggtcctccagtagataagaggcagagcccagcaggaaccccctctgcttgcgggtaggaagcttggggagcagcctcatggaagagaagcagatcctgtgcgtggggctggtggtgctggacatcatcaatgtggtggacaaatacccagaggaagacacggatcgcaggtgcctgtcccagagatggcagcgtggaggcaacgcatccaactcctgcactgtcctttccttgcttggagcccgctgtgccttcatgggctctttggcccctggccacgttgccgacttcctggtggctgacttcaggcagaggggcgtggatgtgtctcaagtgacttggcagagccagggagataccccttgctcttgctgcatcgtcaacaactccaatggctcccgtaccattatactctacgacacgaacctgccagatgtgtctgctaaggactttgagaaggtcgatctgacccggttcaagtggatccacattgagggccggaatgcatcggaacaggtgaagatgctgcagcggatagaggagcacaatgccaagcagcctctgccacagaaggtccgggtgtcggtggagatagagaagccccgtgaggagctcttccagttgtttagctatggtgaggtggtgtttgtcagcaaagatgtggccaagcacctggggttccagtcagcagtggaggccctgaggggcttgtacagtcgagtgaagaaaggggctacgcttgtctgtgcctgggctgaggagggtgccgatgccctgggccccgatggtcagctgctccactcagatgccttcccaccgccccgagtagtagacactcttggggctggagacaccttcaatgcctctgtcatcttcagcctctcgaagggaaacagcatgcaagaggccctgagattcgggtgccaggtggctggcaagaagtgtggcttgcaggggtttgatggcattgtgtgagaggcaagcggcaccagctcgatacctcagaggctggcaccatgcctgccactgccttctctacttcctccagcttagcatccagctgccattccccggcaggtgtgggatgtgggacagcctctgtctgtgtctgcgtctctgtatacctatctcctctctgcagatacctggagcaaataaatcttcccctgagccagc

SEQ ID NO: 8 - DNA, 1455 bp, Mus musculus
  source 1..1455: mol_type = genomic DNA
gctggctcaggggaagatttatttgctccaggtatctgcagagaggagataggtatacagagacgcagacacagacagaggctgtcccacatcccacacctgccggggaatggcagctggatgctaagctggaggaagtagagaaggcagtggcaggcatggtgccagcctctgaggtatcgagctggtgccgcttgcctctcacacaatgccatcaaacccctgcaagccacacttcttgccagccacctggcacccgaatctcagggcctcttgcatgctgtttcccttcgagaggctgaagatgacagaggcattgaaggtgtctccagccccaagagtgtctactactcggggcggtgggaaggcatctgagtggagcagctgaccatcggggcccagggcatcggcaccctcctcagcccaggcacagacaagcgtagcccctttcttcactcgactgtacaagcccctcagggcctccactgctgactggaaccccaggtgcttggccacatctttgctgacaaacaccacctcaccatagctaaacaactggaagagctcctcacggggcttctctatctccaccgacacccggaccttctgtggcagaggctgcttggcattgtgctcctctatccgctgcagcatcttcacctgttccgatgcattccggccctcaatgtggatccacttgaaccgggtcagatcgaccttctcaaagtccttagcagacacatctggcaggttcgtgtcgtagagtataatggtacgggagccattggagttgttgacgatgcagcaagagcaaggggtatctccctggctctgccaagtcacttgagacacatccacgcccctctgcctgaagtcagccaccaggaagtcggcaacgtggccaggggccaaagagcccatgaaggcacagcgggctccaagcaaggaaaggacagtgcaggagttggatgcgttgcctccacgctgccatctctgggacaggcacctgcgatccgtgtcttcctctgggtatttgtccaccacattgatgatgtccagcaccaccagccccacgcacaggatctgcttctcttccatgaggctgctccccaagcttcctacccgcaagcagagggggttcctgctgggctctgcctcttatctactggaggaccgtgtcccaacttctcactggctaccttggctcctcctctgcgtgcagaactcctcccgcagggagctttctgctttgcaagggtgggttacctagcccggccaatggcaggccctctcacttttccgcctcagctgtcaaagcgaaagcgcactagtaatgcatcgcctttccgatccctctgcgcctgctgcagaccctggaccacccggactagcacagtctggcaacagaaacttcgccttcgcaggcggagcacagaagcaagcgttctctccctc

SEQ ID NO: 9 - DNA, 1307 bp, Rattus norvegicus
  source 1..1307: mol_type = genomic DNA
gtgagagggtctgccattggccggactaggtaaccaaaccctcgcaacagcagaaagcaccctgcgggaggagctccgcaggcagaggaggagccagggtagcccctgagaagttgggacacggtcctgcggtagataagagacagagtctagcaggaatcccctccgcttgcgggtaggaagcttggggagcagcctcatggaagagaagcagatcctgtgcgtggggctggtggtgctggacatcatcaatgtggtggacaaatacccagaggaagacacggatcgcaggtgcctatcccagagatggcagcgtggaggcaacgcgtccaactcctgcactgtgctttccttgctcggagcccgctgtgccttcatgggctcgctggcccatggccatgttgccgacttcctggtggccgacttcaggcggaggggtgtggatgtgtctcaagtggcctggcagagccagggagataccccttgctcctgctgcatcgtcaacaactccaatggctcccgtaccattattctctacgacacgaacctgccagatgtgtctgctaaggactttgagaaggtcgatctgacccggttcaagtggatccacattgagggccggaatgcatcggaacaggtaaagatgctacagcggatagaacagtacaatgccacgcagcctctgcagcagaaggtccgggtgtccgtggagatagagaagccccgagaggaactcttccagctgttcggctatggagaggtggtgtttgtcagcaaagatgtggccaagcacctggggttccggtcagcaggggaggccctgaagggcttgtacagtcgtgtgaagaaaggggctacgctcatctgtgcctgggctgaggagggagccgatgccctgggccccgacggccagctgctccactcagatgccttcccaccaccccgagtagtagacactctcggggctggagacaccttcaatgcctctgtcatcttcagcctctccaagggaaacagcatgcaggaggccctgagattcgggtgccaggtggctggcaagaagtgtggcttgcaggggtttgatggcattgtgtgagagatgagcggtgggaggtagcagctcgacacctcagaggctggcaccactgcctgccattgccttcttcatttcatccagcctggcgtctggctgcccagttccctgggccagtgtaggctgtggaacgggtctttctgtctcttctctgcagacacctggagcaaataaatcttcccctgagccaaaaaaaaaaaaaaaaaaaaaaaaa

SEQ ID NO: 10 - DNA, 1307 bp, Rattus norvegicus
  source 1..1307: mol_type = genomic DNA
tttttttttttttttttttttttttggctcaggggaagatttatttgctccaggtgtctgcagagaagagacagaaagacccgttccacagcctacactggcccagggaactgggcagccagacgccaggctggatgaaatgaagaaggcaatggcaggcagtggtgccagcctctgaggtgtcgagctgctacctcccaccgctcatctctcacacaatgccatcaaacccctgcaagccacacttcttgccagccacctggcacccgaatctcagggcctcctgcatgctgtttcccttggagaggctgaagatgacagaggcattgaaggtgtctccagccccgagagtgtctactactcggggtggtgggaaggcatctgagtggagcagctggccgtcggggcccagggcatcggctccctcctcagcccaggcacagatgagcgtagcccctttcttcacacgactgtacaagcccttcagggcctcccctgctgaccggaaccccaggtgcttggccacatctttgctgacaaacaccacctctccatagccgaacagctggaagagttcctctcggggcttctctatctccacggacacccggaccttctgctgcagaggctgcgtggcattgtactgttctatccgctgtagcatctttacctgttccgatgcattccggccctcaatgtggatccacttgaaccgggtcagatcgaccttctcaaagtccttagcagacacatctggcaggttcgtgtcgtagagaataatggtacgggagccattggagttgttgacgatgcagcaggagcaaggggtatctccctggctctgccaggccacttgagacacatccacacccctccgcctgaagtcggccaccaggaagtcggcaacatggccatgggccagcgagcccatgaaggcacagcgggctccgagcaaggaaagcacagtgcaggagttggacgcgttgcctccacgctgccatctctgggataggcacctgcgatccgtgtcttcctctgggtatttgtccaccacattgatgatgtccagcaccaccagccccacgcacaggatctgcttctcttccatgaggctgctccccaagcttcctacccgcaagcggaggggattcctgctagactctgtctcttatctaccgcaggaccgtgtcccaacttctcaggggctaccctggctcctcctctgcctgcggagctcctcccgcagggtgctttctgctgttgcgagggtttggttacctagtccggccaatggcagaccctctcac

SEQ ID NO: 11 - DNA, 1497 bp, Macaca fascicularis
  source 1..1497: mol_type = genomic DNA
cccgggcggggccgggcagccgcgaccacggtcttcaggcagggctgcagatgcaggcccagctctacctcgcgggtccagggtcgggagtccgagacgcaggtggctccccggaggaggagctcccacgcggaggaggagccagggcagctgggagcgaggacaccatcctcctggataacaggcagaggccgggaggaacccgtcagtcgggcgggcaggaagctctgggatcagcctcatggaagagaagcagatcctgtgcgtggggctagtggtgctggacgtcatcagcctggtggacaagtaccctaaggaggactcagagataaggtgcttgtcccagagatggcaacgcggaggcaacgcgtccaactcctgcaccgttctctccctgctcggagccccctgtgccttcatgggctcaatggcccctggccatgttgctgattttgtcctggatgacctccgccgctattctgtggacctacgctacacggtctttcagaccacgggctccgtccccatcgccacggtcatcatcaacgaggccagtggtagccgcaccatcctatactacgacagcttcctggtggccgacttcaggcggcggggtgtggacgtgtctcaggtggcctggcagagcaagggggacacccccagctcctgctgcatcatcaacaactccaatggcaaccgtaccattgtgctccatgacacgagcctgccagatgtgtctgctacggactttgagaaggttgatctgacccagttcaagtggatccacattgagggccggaatgcatcggagcaggtgaagatgctgcagcggatagacgcgcacaacaccaggcagcctccagagcagaagatccgggtgtccgtggaggtggagaagccacaagaggagctctttcagctgtttggctacggagacgtggtgtttgtcagcaaagatgtggccaagcacttggggttccagtcagcaggggaagccctgaggggcttgtatggtcgtgtgaggaaaggggctgtgcttgtctgtgcctgggctgaggagggcgccgacgccctgggccctgatggcaaactgatccactcggatgctttcccgccaccccgcgtggtggataccctgggggctggagacaccttcaatgcctccgtcatcttcagcctctcccaggggaggagcgtgcaggaagcactgagattcggatgccaggtggccggcaagaagtgtggccagcagggctttgatggcatcgtgtcagagccggtgcggtaggaggtgccggctccccgcacactatggaggctgacattgcggctgcatcgccttctcccctccatccagcctggcatccaggttgccctgctcaggggacagatgcaggctgtggggaggactccgcctgtgtcctgtgttccccacacgtctctccctgcagagcctcagagcgaataaatcttcctcggagccagcttcccctggca

SEQ ID NO: 12 - DNA, 2256 bp, Macaca fascicularis
  source 1..2256: mol_type = genomic DNA
atgttgggcattatatatattacatgattttatcctcgcaataattctgtagccaggcagaattggctccatttgacagatgaagaaattgaggcggattgtgttaagcgctgtaccctcaggtgacatgcagctaattaaatggcagatttgaatctaggtctgtctgactctaaagccctttaccttatgtgctctttacattataaggccttatccactctatattggagttggccccaattccaatatgtgttccagatccgacctccctgaggacaacactctatcttgggtcacatttgtggctgaggcatccccttaattccaaggtgggctccacgggtgagactttcaggctctggggcagtcagcgggaggagatatttttggacaacaaagacgccaccaaatcacaggctggtgggcagggcagaggaggcgccccaccccctcgccccccactggcctgtcagtttggctcagccgtgtggactcccagcttctgagctatgggaatagagtctgcacaacgcagggccccaaagagctctcatggcttctggttctttggcaggttcgctgggtatggggcactgagtgtcctccccagccagggcagagctggcggcaagcctggggcacttcttgctgctatagcccaggcagcccctcctctgggcctgggtggagaggttaatttggggaatgcacacgaggagggaggactggagagtcagagcctcaggaatgcccagccagagcagttcagacatcgaggacagaagctgccaggggaagctggctccgaggaagatttattcgctctgaggctctgcagggagagacgtgtggggaacacaggacacaggcggagtcctccccacagcctgcatctgtcccctgagcagggcaacctggatgccaggctggatggaggggagaaggcgatgcagccgcaatgtcagcctccatagtgtgcggggagccggcacctcctaccgcaccggctctgacacgatgccatcaaagccctgctggccacacttcttgccggccacctggcatccgaatctcagtgcttcctgcacgctcctcccctgggagaggctgaagatgacggaggcattgaaggtgtctccagcccccagggtatccaccacgcggggtggcgggaaagcatccgagtggatcagtttgccatcagggcccagggcgtcggcgccctcctcagcccaggcacagacaagcacagcccctttcctcacacgaccatacaagcccctcagggcttcccctgctgactggaaccccaagtgcttggccacatctttgctgacaaacaccacgtctccgtagccaaacagctgaaagagctcctcttgtggcttctccacctccacggacacccggatcttctgctctggaggctgcctggtgttgtgcgcgtctatccgctgcagcatcttcacctgctccgatgcattccggccctcaatgtggatccacttgaactgggtcagatcaaccttctcaaagtccgtagcagacacatctggcaggctcgtgtcatggagcacaatggtacggttgccattggagttgttgatgatgcagcaggagctgggggtgtcccccttgctctgccaggccacctgagacacgtccacaccccgccgcctgaagtcggccaccaggaagctgtcgtagtataggatggtgcggctaccactggcctcgttgatgatgaccgtggcgatggggacggagcccgtggtctgaaagaccgtgtagcgtaggtccacagaatagcggcggaggtcatccaggacaaaatcagcaacatggccaggggccattgagcccatgaaggcacagggggctccgagcagggagagaacggtgcaggagttggacgcgttgcctccgcgttgccatctctgggacaagcaccttatctctgagtcctccttagggtacttgtccaccaggctgatgacgtccagcaccactagccccacgcacaggatctgcttctcttccatgaggctgatcccagagcttcctgcccgcccgactgacgggttcctcccggcctctgcctgttatccaggaggatggtgtcctcgctcccagctgccctggctcctcctccgcgtgggagctcctcctccggggagccacctgcgtctcggactcccgaccctggacccgcgaggtagagctgggcctgcatctgcagccctgcctgaagac

SEQ ID NO: 13 - protein, 16 aa, unidentified
  REGION 1..16: note = source = /note="Description of Unknown: RFGF sequence"
AAVALLPAVLLALLAP

SEQ ID NO: 14 - protein, 11 aa, unidentified
  REGION 1..11: note = source = /note="Description of Unknown: RFGF analogue sequence"
AALLPVLLAAP

SEQ ID NO: 15 - protein, 13 aa, Human immunodeficiency virus
GRKKRRQRRRPPQ

SEQ ID NO: 16 - protein, 16 aa, Drosophila sp.
RQIKIWFQNRRMKWKK

SEQ ID NO: 17 - RNA, 19 nt, synthetic construct
  source 1..19: mol_type = other RNA
aggcagggctgcagatgcg

SEQ ID NO: 18 - RNA, 19 nt, synthetic construct
  source 1..19: mol_type = other RNA
gcagatgcgaggcccagct

SEQ ID NO: 19 - RNA, 19 nt, synthetic construct
  source 1..19: mol_type = other RNA
gcccagctgtacctcgcgt

SEQ ID NO: 20 - RNA, 19 nt, synthetic construct
  source 1..19: mol_type = other RNA
acctcgcgtgtcccgggtc

SEQ ID NO: 21 - RNA, 19 nt, synthetic construct
  source 1..19: mol_type = other RNA
ccgggtcgggagtcggaga

SEQ ID NO: 22 - RNA, 19 nt, synthetic construct
  source 1..19: mol_type = other RNA
tcggagacgcaggtgcagg

SEQ ID NO: 23 - RNA, 19 nt, synthetic construct
  source 1..19: mol_type = other RNA
caggtgcaggagagtgcgg

SEQ ID NO: 24 - RNA, 19 nt, synthetic construct
  source 1..19: mol_type = other RNA
agtgcggggcaagtagcgc

SEQ ID NO: 25 - RNA, 19 nt, synthetic construct
  source 1..19: mol_type = other RNA
aagtagcgcattttctctt

SEQ ID NO: 26 - RNA, 19 nt, synthetic construct
  source 1..19: mol_type = other RNA
ttctctttgcattctcgag

SEQ ID NO: 27 - RNA, 19 nt, synthetic construct
  source 1..19: mol_type = other RNA
ttctcgagatcgcttagcc

SEQ ID NO: 28 - RNA, 19 nt, synthetic construct
  source 1..19: mol_type = other RNA
tttaaaaaggtttgcatca

SEQ ID NO: 29 - RNA, 19 nt, synthetic construct
  source 1..19: mol_type = other RNA
ttgcatcagctgtgagtcc

SEQ ID NO: 30 - RNA, 19 nt, synthetic construct
  source 1..19: mol_type = other RNA
tgtgagtccatctgacaag

SEQ ID NO: 31 - RNA, 19 nt, synthetic construct
  source 1..19: mol_type = other RNA
tctgacaagcgaggaaact

SEQ ID NO: 32 - RNA, 19 nt, synthetic construct
  source 1..19: mol_type = other RNA
gaaactaaggctgagaagt

SEQ ID NO: 33 - RNA, 19 nt, synthetic construct
  source 1..19: mol_type = other RNA
ctgagaagtgggaggcgtt

SEQ ID NO: 34 - RNA, 19 nt, synthetic construct
  source 1..19: mol_type = other RNA
aggcgttgccatctgcagg

SEQ ID NO: 35 - RNA, 19 nt, synthetic construct
  source 1..19: mol_type = other RNA
tctgcaggcccaggcaacc

SEQ ID NO: 36 - RNA, 19 nt, synthetic construct
  source 1..19: mol_type = other RNA
aggcaacctgctacgggaa

SEQ ID NO: 37 - RNA, 19 nt, synthetic construct
  source 1..19: mol_type = other RNA
tacgggaagaccggggacc

SEQ ID NO: 38 - RNA, 19 nt, synthetic construct
  source 1..19: mol_type = other RNA
cggggaccaagacctctgg

SEQ ID NO: 39 - RNA, 19 nt, synthetic construct
  source 1..19: mol_type = other RNA
agacctctgggttggcttt

SEQ ID NO: 40 - RNA, 19 nt, synthetic construct
  source 1..19: mol_type = other RNA
ttggctttcctagacccgc

SEQ ID NO: 41 - RNA, 19 nt, synthetic construct
  source 1..19: mol_type = other RNA
agacccgctcgggtcttcg

SEQ ID NO: 42 - RNA, 19 nt, synthetic construct
  source 1..19: mol_type = other RNA
tcttcgggtgtcgcgagga

SEQ ID NO: 43 - RNA, 19 nt, synthetic construct
  source 1..19: mol_type = other RNA
cgcgaggaagggccctgct

SEQ ID NO: 44 - RNA, 19 nt, synthetic construct
  source 1..19: mol_type = other RNA
gggccctgctcctttcgtt

SEQ ID NO: 45 - RNA, 19 nt, synthetic construct
  source 1..19: mol_type = other RNA
tgcacccctggccgctgca

SEQ ID NO: 46 - RNA, 19 nt, synthetic construct
  source 1..19: mol_type = other RNA
ccgctgcaggtggctccct

SEQ ID NO: 47 - RNA, 19 nt, synthetic construct
  source 1..19: mol_type = other RNA
gctccctggaggaggagct

SEQ ID NO: 48 - RNA, 19 nt, synthetic construct
  source 1..19: mol_type = other RNA
aggagctcccacgcggagg

SEQ ID NO: 49 - RNA, 19 nt, synthetic construct
  source 1..19: mol_type = other RNA
acgcggaggaggagccagg

SEQ ID NO: 50 - RNA, 19 nt, synthetic construct
  source 1..19: mol_type = other RNA
agccagggcagctgggagc

SEQ ID NO: 51 - RNA, 19 nt, synthetic construct
  source 1..19: mol_type = other RNA
ctgggagcggggacaccat

SEQ ID NO: 52 - RNA, 19 nt, synthetic construct
  source 1..19: mol_type = other RNA
ggacaccatcctcctggat

SEQ ID NO: 53 - RNA, 19 nt, synthetic construct
  source 1..19: mol_type = other RNA
cctggataagaggcagagg

SEQ ID NO: 54 - RNA, 19 nt, synthetic construct
  source 1..19: mol_type = other RNA
aggcagaggccgggaggaa

SEQ ID NO: 55 - RNA, 19 nt, synthetic construct
  source 1..19: mol_type = other RNA
ggaggaaccccgtcagccg

SEQ ID NO: 56 - RNA, 19 nt, synthetic construct
  source 1..19: mol_type = other RNA
cgtcagccgggcgggcagg

SEQ ID NO: 57 - RNA, 19 nt, synthetic construct
  source 1..19: mol_type = other RNA
cgggcaggaagctctggga

SEQ ID NO: 58 - RNA, 19 nt, synthetic construct
  source 1..19: mol_type = other RNA
tctgggagtagcctcatgg

SEQ ID NO: 59 - RNA, 19 nt, synthetic construct
  source 1..19: mol_type = other RNA
agcctcatggaagagaagc

SEQ ID NO: 60 - RNA, 19 nt, synthetic construct
  source 1..19: mol_type = other RNA
agaagcagatcctgtgcgt

SEQ ID NO: 61 - RNA, 19 nt, synthetic construct
  source 1..19: mol_type = other RNA
ctgtgcgtggggctagtgg

SEQ ID NO: 62 - RNA, 19 nt, synthetic construct
  source 1..19: mol_type = other RNA
ggctagtggtgctggacgt

SEQ ID NO: 63 - RNA, 19 nt, synthetic construct
  source 1..19: mol_type = other RNA
tggacgtcatcagcctggt

SEQ ID NO: 64 - RNA, 19 nt, synthetic construct
  source 1..19: mol_type = other RNA
agcctggtggacaagtacc

SEQ ID NO: 65 - RNA, 19 nt, synthetic construct
  source 1..19: mol_type = other RNA
acaagtaccctaaggagga

SEQ ID NO: 66 - RNA, 19 nt, synthetic construct
  source 1..19: mol_type = other RNA
aaggaggactcggagataa

SEQ ID NO: 67 - RNA, 19 nt, synthetic construct
  source 1..19: mol_type = other RNA
cggagataaggagcctgcc

SEQ ID NO: 68 - RNA, 19 nt, synthetic construct
  source 1..19: mol_type = other RNA
agcctgccagatgtgtctg

SEQ ID NO: 69 - RNA, 19 nt, synthetic construct
  source 1..19: mol_type = other RNA
tgtgtctgctacagacttt

SEQ ID NO: 70 - RNA, 19 nt, synthetic construct
  source 1..19: mol_type = other RNA
cagactttgagaaggttga

SEQ ID NO: 71 - RNA, 19 nt, synthetic construct
  source 1..19: mol_type = other RNA
aggttgatctgacccagtt

SEQ ID NO: 72 - RNA, 19 nt, synthetic construct
  source 1..19: mol_type = other RNA
acccagttcaagtggatcc

SEQ ID NO: 73 - RNA, 19 nt, synthetic construct
  source 1..19: mol_type = other RNA
agtggatccacattgaggg

SEQ ID NO: 74 - RNA, 19 nt, synthetic construct
  source 1..19: mol_type = other RNA
ttgagggccggaacgcatc

SEQ ID NO: 75 - RNA, 19 nt, synthetic construct
  source 1..19: mol_type = other RNA
aacgcatcggagcaggtga

SEQ ID NO: 76 - RNA, 19 nt, synthetic construct
  source 1..19: mol_type = other RNA
agcaggtgaagatgctgca

SEQ ID NO: 77 - RNA, 19 nt, synthetic construct
  source 1..19: mol_type = other RNA
tgctgcagcggatagacgc

SEQ ID NO: 78 - RNA, 19 nt, synthetic construct
  source 1..19: mol_type = other RNA
atagacgcacacaacacca

SEQ ID NO: 79 - RNA, 19 nt, synthetic construct
  source 1..19: mol_type = other RNA
cagcctccagagcagaaga

SEQ ID NO: 80 - RNA, 19 nt, synthetic construct
  source 1..19: mol_type = other RNA
agaagatccgggtgtccgt

SEQ ID NO: 81 - RNA, 19 nt, synthetic construct
  source 1..19: mol_type = other RNA
gtgtccgtggaggtggaga

SEQ ID NO: 82 - RNA, 19 nt, synthetic construct
  source 1..19: mol_type = other RNA
aggtggagaagccacgaga

SEQ ID NO: 83 - RNA, 19 nt, synthetic construct
  source 1..19: mol_type = other RNA
ccacgagaggagctcttcc

SEQ ID NO: 84 - RNA, 19 nt, synthetic construct
  source 1..19: mol_type = other RNA
agctcttccagctgtttgg

SEQ ID NO: 85 - RNA, 19 nt, synthetic construct
  source 1..19: mol_type = other RNA
tgtttggctacggagacgt

SEQ ID NO: 86 - RNA, 19 nt, synthetic construct
  source 1..19: mol_type = other RNA
ggagacgtggtgtttgtca

SEQ ID NO: 87 - RNA, 19 nt, synthetic construct
  source 1..19: mol_type = other RNA
tttgtcagcaaagatgtgg

SEQ ID NO: 88 - RNA, 19 nt, synthetic construct
  source 1..19: mol_type = other RNA
aaagatgtggccaagcact

SEQ ID NO: 89 - RNA, 19 nt, synthetic construct
  source 1..19: mol_type = other RNA
aagcacttggggttccagt

SEQ ID NO: 90 - RNA, 19 nt, synthetic construct
  source 1..19: mol_type = other RNA
ttccagtcagcagaggaag

SEQ ID NO: 91 - RNA, 19 nt, synthetic construct
  source 1..19: mol_type = other RNA
agaggaagccttgaggggc

SEQ ID NO: 92 - RNA, 19 nt, synthetic construct
  source 1..19: mol_type = other RNA
ttgaggggcttgtatggtc

SEQ ID NO: 93 - RNA, 19 nt, synthetic construct
  source 1..19: mol_type = other RNA
tatggtcgtgtgaggaaag

SEQ ID NO: 94 - RNA, 19 nt, synthetic construct
  source 1..19: mol_type = other RNA
tgaggaaaggggctgtgct

SEQ ID NO: 95 - RNA, 19 nt, synthetic construct
  source 1..19: mol_type = other RNA
ctgtgcctgggctgaggag

SEQ ID NO: 96 - RNA, 19 nt, synthetic construct
  source 1..19: mol_type = other RNA
tgaggagggcgccgacgcc

SEQ ID NO: 97 - RNA, 19 nt, synthetic construct
  source 1..19: mol_type = other RNA
ccgacgccctgggccctga

SEQ ID NO: 98 - RNA, 19 nt, synthetic construct
  source 1..19: mol_type = other RNA
tgggccctgatggcaaatt

SEQ ID NO: 99 - RNA, 19 nt, synthetic construct
  source 1..19: mol_type = other RNA
caaattgctccactcggat

SEQ ID NO: 100 - RNA, 19 nt, synthetic construct
  source 1..19: mol_type = other RNA
actcggatgctttcccgcc

SEQ ID NO: 101 - RNA, 19 nt, synthetic construct
  source 1..19: mol_type = other RNA
tttcccgccaccccgcgtg

SEQ ID NO: 102 - RNA, 19 nt, synthetic construct
  source 1..19: mol_type = other RNA
ccgcgtggtggatacactg

SEQ ID NO: 103 - RNA, 19 nt, synthetic construct
  source 1..19: mol_type = other RNA
atacactgggagctggaga

SEQ ID NO: 104 - RNA, 19 nt, synthetic construct
  source 1..19: mol_type = other RNA
agctggagacaccttcaat

SEQ ID NO: 105 - RNA, 19 nt, synthetic construct
  source 1..19: mol_type = other RNA
accttcaatgcctccgtca

SEQ ID NO: 106 - RNA, 19 nt, synthetic construct
  source 1..19: mol_type = other RNA
tccgtcatcttcagcctct

SEQ ID NO: 107 - RNA, 19 nt, synthetic construct
  source 1..19: mol_type = other RNA
agcctctcccaggggagga

SEQ ID NO: 108 - RNA, 19 nt, synthetic construct
  source 1..19: mol_type = other RNA
tgcaggaagcactgagatt

SEQ ID NO: 109 - RNA, 19 nt, synthetic construct
  source 1..19: mol_type = other RNA
ctgagattcgggtgccagg

SEQ ID NO: 110 - RNA, 19 nt, synthetic construct
  source 1..19: mol_type = other RNA
ggtgccaggtggccggcaa

SEQ ID NO: 111 - RNA, 19 nt, synthetic construct
  source 1..19: mol_type = other RNA
agtgtggcctgcagggctt

SEQ ID NO: 112 - RNA, 19 nt, synthetic construct
  source 1..19: mol_type = other RNA
cagggctttgatggcatcg

SEQ ID NO: 113 - RNA, 19 nt, synthetic construct
  source 1..19: mol_type = other RNA
gcatcgtgtgagagcaggt

SEQ ID NO: 114 - RNA, 19 nt, synthetic construct
  source 1..19: mol_type = other RNA
agagcaggtgccggctcct

SEQ ID NO: 115 - RNA, 19 nt, synthetic construct
  source 1..19: mol_type = other RNA
ccggctcctcacacaccat

SEQ ID NO: 116 - RNA, 19 nt, synthetic construct
  source 1..19: mol_type = other RNA
cacaccatggagactacca

SEQ ID NO: 117 - RNA, 19 nt, synthetic construct
  source 1..19: mol_type = other RNA
actaccattgcggctgcat

SEQ ID NO: 118 - RNA, 19 nt, synthetic construct
  source 1..19: mol_type = other RNA
cggctgcatcgccttctcc

SEQ ID NO: 119 - RNA, 19 nt, synthetic construct
  source 1..19: mol_type = other RNA
ttctcccctccatccagcc

SEQ ID NO: 120 - RNA, 19 nt, synthetic construct
  source 1..19: mol_type = other RNA
atccagcctggcgtccagg

SEQ ID NO: 121 - RNA, 19 nt, synthetic construct
  source 1..19: mol_type = other RNA
ggcgtccaggttgccctgt

SEQ ID NO: 122 - RNA, 19 nt, synthetic construct
  source 1..19: mol_type = other RNA
ccctgttcaggggacagat

SEQ ID NO: 123 - RNA, 19 nt, synthetic construct
  source 1..19: mol_type = other RNA
ggggacagatgcaagctgt

SEQ ID NO: 124 - RNA, 19 nt, synthetic construct
  source 1..19: mol_type = other RNA
caagctgtggggaggactc

SEQ ID NO: 125 - RNA, 19 nt, synthetic construct
  source 1..19: mol_type = other RNA
aggactctgcctgtgtcct

SEQ ID NO: 126 - RNA, 19 nt, synthetic construct
  source 1..19: mol_type = other RNA
ctgtgtcctgtgttcccca

SEQ ID NO: 127 - RNA, 19 nt, synthetic construct
  source 1..19: mol_type = other RNA
ttccccacagggagaggct

SEQ ID NO: 128 - RNA, 19 nt, synthetic construct
  source 1..19: mol_type = other RNA
agaggctctggggggatgg

SEQ ID NO: 129 - RNA, 19 nt, synthetic construct
  source 1..19: mol_type = other RNA
ggggggatggctgggggat

SEQ ID NO: 130 - RNA, 19 nt, synthetic construct
  source 1..19: mol_type = other RNA
tgggggatgcagagcctca

SEQ ID NO: 131 - RNA, 19 nt, synthetic construct
  source 1..19: mol_type = other RNA
agcctcagagcaaataaat

SEQ ID NO: 132 - RNA, 19 nt, synthetic construct
  source 1..19: mol_type = other RNA
aaataaatcttcctcagag

SEQ ID NO: 133 - RNA, 19 nt, synthetic construct
  source 1..19: mol_type = other RNA
cctcagagccagcttctcc

SEQ ID NO: 134 - RNA, 19 nt, synthetic construct
  source 1..19: mol_type = other RNA
agcttctcctctcaatgtc

SEQ ID NO: 135 - RNA, 19 nt, synthetic construct
  source 1..19: mol_type = other RNA
tcaatgtctgaactgctct

SEQ ID NO: 136 - RNA, 19 nt, synthetic construct
  source 1..19: mol_type = other RNA
tgctctggctgggcattcc

SEQ ID NO: 137 - RNA, 19 nt, synthetic construct
  source 1..19: mol_type = other RNA
tgggcattcctgaggctct

SEQ ID NO: 138 - RNA, 19 nt, synthetic construct
  source 1..19: mol_type = other RNA
gaggctctgactcttcgat

SEQ ID NO: 139 - RNA, 19 nt, synthetic construct
  source 1..19: mol_type = other RNA
ccattccccaaattaacct

SEQ ID NO: 140 - RNA, 19 nt, synthetic construct
  source 1..19: mol_type = other RNA
ttaacctctccgcccaggc

SEQ ID NO: 141 - RNA, 19 nt, synthetic construct
  source 1..19: mol_type = other RNA
gcccaggcccagaggaggg

SEQ ID NO: 142 - RNA, 19 nt, synthetic construct
  source 1..19: mol_type = other RNA
cagaggaggggctgcctgg

SEQ ID NO: 143 - RNA, 19 nt, synthetic construct
  source 1..19: mol_type = other RNA
tgcctgggctagagcagcg

SEQ ID NO: 144 - RNA, 19 nt, synthetic construct
  source 1..19: mol_type = other RNA
agagcagcgagaagtgccc

SEQ ID NO: 145 - RNA, 19 nt, synthetic construct
  source 1..19: mol_type = other RNA
aagtgccctgggcttgcca

SEQ ID NO: 146 - RNA, 19 nt, synthetic construct
  source 1..19: mol_type = other RNA
ttgccaccagctctgccct

SEQ ID NO: 147 - RNA, 19 nt, synthetic construct
  source 1..19: mol_type = other RNA
ctctgccctggctggggag

SEQ ID NO: 148 - RNA, 19 nt, synthetic construct
  source 1..19: mol_type = other RNA
gctggggaggacactcggt

SEQ ID NO: 149 - RNA, 19 nt, synthetic construct
  source 1..19: mol_type = other RNA
acacccagtgaacctgcca

SEQ ID NO: 150 - RNA, 19 nt, synthetic construct
  source 1..19: mol_type = other RNA
aacctgccaaagaaaccgt

SEQ ID NO: 151 - RNA, 19 nt, synthetic construct
  source 1..19: mol_type = other RNA
agaaaccgtgagagctctt

SEQ ID NO: 152 - RNA, 19 nt, synthetic construct
  source 1..19: mol_type = other RNA
gctcttcggggccctgcgt

SEQ ID NO: 153 - RNA, 19 nt, synthetic construct
  source 1..19: mol_type = other RNA
ccctgcgttgtgcagactc

SEQ ID NO: 154 - RNA, 19 nt, synthetic construct
  source 1..19: mol_type = other RNA
tgcagactctattcccaca

SEQ ID NO: 155 - RNA, 19 nt, synthetic construct
  source 1..19: mol_type = other RNA
ttcccacagctcagaagct

SEQ ID NO: 156 - RNA, 19 nt, synthetic construct
  source 1..19: mol_type = other RNA
cagaagctgggagtccaca

SEQ ID NO: 157 - RNA, 19 nt, synthetic construct
  source 1..19: mol_type = other RNA
gagtccacaccgctgagct

SEQ ID NO: 158 - RNA, 19 nt, synthetic construct
  source 1..19: mol_type = other RNA
tgagctgaactgacaggcc

SEQ ID NO: 159 - RNA, 19 nt, synthetic construct
  source 1..19: mol_type = other RNA
tgacaggccagtggggggc

SEQ ID NO: 160 - RNA, 19 nt, synthetic construct
  source 1..19: mol_type = other RNA
tggggggcaggggtgcgcc

SEQ ID NO: 161 - RNA, 19 nt, synthetic construct
  source 1..19: mol_type = other RNA
ggtgcgcctcctctgccct

SEQ ID NO: 162 - RNA, 19 nt, synthetic construct
  source 1..19: mol_type = other RNA
tctgccctgcccaccagcc

SEQ ID NO: 163 - RNA, 19 nt, synthetic construct
  source 1..19: mol_type = other RNA
accagcctgtgatttgatg

SEQ ID NO: 164 - RNA, 19 nt, synthetic construct
  source 1..19: mol_type = other RNA
tgatttgatggggtcttca

SEQ ID NO: 165 - RNA, 19 nt, synthetic construct
  source 1..19: mol_type = other RNA
gtcttcattgtccagaaat

SEQ ID NO: 166 - RNA, 19 nt, synthetic construct
  source 1..19: mol_type = other RNA
tccagaaatacctcctccc

SEQ ID NO: 167 - RNA, 19 nt, synthetic construct
  source 1..19: mol_type = other RNA
tcctcccgctgactgcccc

SEQ ID NO: 168 - RNA, 19 nt, synthetic construct
  source 1..19: mol_type = other RNA
actgccccagagcctgaaa

SEQ ID NO: 169 - RNA, 19 nt, synthetic construct
  source 1..19: mol_type = other RNA
agcctgaaagtctcaccct

SEQ ID NO: 170 - RNA, 19 nt, synthetic construct
  source 1..19: mol_type = other RNA
tcacccttggagcccacct

SEQ ID NO: 171 - RNA, 19 nt, synthetic construct
  source 1..19: mol_type = other RNA
cccaccttggaattaaggg

SEQ ID NO: 172 - RNA, 19 nt, synthetic construct
  source 1..19: mol_type = other RNA
gaattaagggcgtgcctca

SEQ ID NO: 173 - RNA, 19 nt, synthetic construct
  source 1..19: mol_type = other RNA
tgcctcagccacaaatgtg

SEQ ID NO: 174 - RNA, 19 nt, synthetic construct
  source 1..19: mol_type = other RNA
acaaatgtgacccaggata

SEQ ID NO: 175 - RNA, 19 nt, synthetic construct
  source 1..19: mol_type = other RNA
caggatacagagtgttgct

SEQ ID NO: 176 - RNA, 19 nt, synthetic construct
  source 1..19: mol_type = other RNA
agtgttgctgtcctcaggg

SEQ ID NO: 177 - RNA, 19 nt, synthetic construct
  source 1..19: mol_type = other RNA
cctcagggaggtccgatct

SEQ ID NO: 178 - RNA, 19 nt, synthetic construct
  source 1..19: mol_type = other RNA
tccgatctggaacacatat

SEQ ID NO: 179 - RNA, 19 nt, synthetic construct
  source 1..19: mol_type = other RNA
acacatattggaattgggg

SEQ ID NO: 180 - RNA, 19 nt, synthetic construct
  source 1..19: mol_type = other RNA
ttggggccaactccaatat

SEQ ID NO: 181 - RNA, 19 nt, synthetic construct
  source 1..19: mol_type = other RNA
actccaatatagggtgggt

SEQ ID NO: 182 - RNA, 19 nt, synthetic construct
  source 1..19: mol_type = other RNA
gtgggtaaggccttataat

SEQ ID NO: 183 - RNA, 19 nt, synthetic construct
  source 1..19: mol_type = other RNA
ccttataatgtaaagagca

SEQ ID NO: 184 - RNA, 19 nt, synthetic construct
  source 1..19: mol_type = other RNA
aagagcatataatgtaaag

SEQ ID NO: 185 - RNA, 19 nt, synthetic construct
  source 1..19: mol_type = other RNA
taatgtaaagggctttaga

SEQ ID NO: 186 - RNA, 19 nt, synthetic construct
  source 1..19: mol_type = other RNA
tttagagtgagacagacct

SEQ ID NO: 187 - RNA, 19 nt, synthetic construct
  source 1..19: mol_type = other RNA
acagacctggattaaaatc

SEQ ID NO: 188 - RNA, 19 nt, synthetic construct
  source 1..19: mol_type = other RNA
ttaaaatctgccatttaat

SEQ ID NO: 189 - RNA, 19 nt, synthetic construct
  source 1..19: mol_type = other RNA
catttaattagctgcatat

SEQ ID NO: 190 - RNA, 19 nt, synthetic construct
  source 1..19: mol_type = other RNA
cttagggtacagcacttaa

SEQ ID NO: 191 - RNA, 19 nt, synthetic construct
  source 1..19: mol_type = other RNA
cagcacttaacgcaatctg

SEQ ID NO: 192 - RNA, 19 nt, synthetic construct
  source 1..19: mol_type = other RNA
gcaatctgcctcaatttct

SEQ ID NO: 193 - RNA, 19 nt, synthetic construct
  source 1..19: mol_type = other RNA
aatttcttcatctgtcaaa

SEQ ID NO: 194 - RNA, 19 nt, synthetic construct
  source 1..19: mol_type = other RNA
gaaccaattctgcttggct

SEQ ID NO: 195 - RNA, 19 nt, synthetic construct
  source 1..19: mol_type = other RNA
ttggctacagaattattgt

SEQ ID NO: 196 - RNA, 19 nt, synthetic construct
  source 1..19: mol_type = other RNA
attattgtgaggataaaat

SEQ ID NO: 197 - RNA, 19 nt, synthetic construct
  source 1..19: mol_type = other RNA
aggataaaatcatatataa

SEQ ID NO: 198 - RNA, 19 nt, synthetic construct
  source 1..19: mol_type = other RNA
tatataaaatgcccagcat

SEQ ID NO: 199 - RNA, 19 nt, synthetic construct
  source 1..19: mol_type = other RNA
cgcatctgcagccctgcct

SEQ ID NO: 200 - RNA, 19 nt, synthetic construct
  source 1..19: mol_type = other RNA
agctgggcctcgcatctgc

SEQ ID NO: 201 - RNA, 19 nt, synthetic construct
  source 1..19: mol_type = other RNA
acgcgaggtacagctgggc

SEQ ID NO: 202 - RNA, 19 nt, synthetic construct
  source 1..19: mol_type = other RNA
gacccgggacacgcgaggt

SEQ ID NO: 203 - RNA, 19 nt, synthetic construct
  source 1..19: mol_type = other RNA
tctccgactcccgacccgg

SEQ ID NO: 204 - RNA, 19 nt, synthetic construct
  source 1..19: mol_type = other RNA
cctgcacctgcgtctccga

SEQ ID NO: 205 - RNA, 19 nt, synthetic construct
  source 1..19: mol_type = other RNA
ccgcactctcctgcacctg

SEQ ID NO: 206 - RNA, 19 nt, synthetic construct
  source 1..19: mol_type = other RNA
gcgctacttgccccgcact

SEQ ID NO: 207 - RNA, 19 nt, synthetic construct
  source 1..19: mol_type = other RNA
aagagaaaatgcgctactt

SEQ ID NO: 208 - RNA, 19 nt, synthetic construct
  source 1..19: mol_type = other RNA
ctcgagaatgcaaagagaa

SEQ ID NO: 209 - RNA, 19 nt, synthetic construct
  source 1..19: mol_type = other RNA
ggctaagcgatctcgagaa

SEQ ID NO: 210 - RNA, 19 nt, synthetic construct
  source 1..19: mol_type = other RNA
tgatgcaaacctttttaaa

SEQ ID NO: 211 - RNA, 19 nt, synthetic construct
  source 1..19: mol_type = other RNA
ggactcacagctgatgcaa

SEQ ID NO: 212 - RNA, 19 nt, synthetic construct
  source 1..19: mol_type = other RNA
cttgtcagatggactcaca

SEQ ID NO: 213 - RNA, 19 nt, synthetic construct
  source 1..19: mol_type = other RNA
agtttcctcgcttgtcaga

SEQ ID NO: 214 - RNA, 19 nt, synthetic construct
  source 1..19: mol_type = other RNA
acttctcagccttagtttc

SEQ ID NO: 215 - RNA, 19 nt, synthetic construct
  source 1..19: mol_type = other RNA
aacgcctcccacttctcag

SEQ ID NO: 216 - RNA, 19 nt, synthetic construct
  source 1..19: mol_type = other RNA
cctgcagatggcaacgcct

SEQ ID NO: 217 - RNA, 19 nt, synthetic construct
  source 1..19: mol_type = other RNA
ggttgcctgggcctgcaga

SEQ ID NO: 218 - RNA, 19 nt, synthetic construct
  source 1..19: mol_type = other RNA
ttcccgtagcaggttgcct

SEQ ID NO: 219 - RNA, 19 nt, synthetic construct
  source 1..19: mol_type = other RNA
ggtccccggtcttcccgta

SEQ ID NO: 220 - RNA, 19 nt, synthetic construct
  source 1..19: mol_type = other RNA
ccagaggtcttggtccccg

SEQ ID NO: 221 - RNA, 19 nt, synthetic construct
  source 1..19: mol_type = other RNA
aaagccaacccagaggtct

SEQ ID NO: 222 - RNA, 19 nt, synthetic construct
  source 1..19: mol_type = other RNA
gcgggtctaggaaagccaa

SEQ ID NO: 223 - RNA, 19 nt, synthetic construct
  source 1..19: mol_type = other RNA
cgaagacccgagcgggtct

SEQ ID NO: 224 - RNA, 19 nt, synthetic construct
  source 1..19: mol_type = other RNA
tcctcgcgacacccgaaga

SEQ ID NO: 225 - RNA, 19 nt, synthetic construct
  source 1..19: mol_type = other RNA
agcagggcccttcctcgcg

SEQ ID NO: 226 - RNA, 19 nt, synthetic construct
  source 1..19: mol_type = other RNA
aacgaaaggagcagggccc

SEQ ID NO: 227 - RNA, 19 nt, synthetic construct
  source 1..19: mol_type = other RNA
tgcagcggccaggggtgca

SEQ ID NO: 228 - RNA, 19 nt, synthetic construct
  source 1..19: mol_type = other RNA
agggagccacctgcagcgg

SEQ ID NO: 229 - RNA, 19 nt, synthetic construct
  source 1..19: mol_type = other RNA
agctcctcctccagggagc

SEQ ID NO: 230 - RNA, 19 nt, synthetic construct
  source 1..19: mol_type = other RNA
cctccgcgtgggagctcct

SEQ ID NO: 231 - RNA, 19 nt, synthetic construct
  source 1..19: mol_type = other RNA
cctggctcctcctccgcgt

SEQ ID NO: 232 - RNA, 19 nt, synthetic construct
  source 1..19: mol_type = other RNA
gctcccagctgccctggct

SEQ ID NO: 233 - RNA, 19 nt, synthetic construct
  source 1..19: mol_type = other RNA
atggtgtccccgctcccag

SEQ ID NO: 234 - RNA, 19 nt, synthetic construct
  source 1..19: mol_type = other RNA
atccaggaggatggtgtcc

SEQ ID NO: 235 - RNA, 19 nt, synthetic construct
  source 1..19: mol_type = other RNA
cctctgcctcttatccagg

SEQ ID NO: 236 - RNA, 19 nt, synthetic construct
  source 1..19: mol_type = other RNA
ttcctcccggcctctgcct

SEQ ID NO: 237 - RNA, 19 nt, synthetic construct
  source 1..19: mol_type = other RNA
cggctgacggggttcctcc

SEQ ID NO: 238 - RNA, 19 nt, synthetic construct
  source 1..19: mol_type = other RNA
cctgcccgcccggctgacg

SEQ ID NO: 239 - RNA, 19 nt, synthetic construct
  source 1..19: mol_type = other RNA
tcccagagcttcctgcccg

SEQ ID NO: 240 - RNA, 19 nt, synthetic construct
  source 1..19: mol_type = other RNA
ccatgaggctactcccaga

SEQ ID NO: 241 - RNA, 19 nt, synthetic construct
  source 1..19: mol_type = other RNA
gcttctcttccatgaggct

SEQ ID NO: 242 - RNA, 19 nt, synthetic construct
  source 1..19: mol_type = other RNA
acgcacaggatctgcttct

SEQ ID NO: 243 - RNA, 19 nt, synthetic construct
  source 1..19: mol_type = other RNA
ccactagccccacgcacag

SEQ ID NO: 244 - RNA, 19 nt, synthetic construct
  source 1..19: mol_type = other RNA
acgtccagcaccactagcc

SEQ ID NO: 245 - RNA, 19 nt, synthetic construct
  source 1..19: mol_type = other RNA
accaggctgatgacgtcca

SEQ ID NO: 246 - RNA, 19 nt, synthetic construct
  source 1..19: mol_type = other RNA
ggtacttgtccaccaggct

SEQ ID NO: 247 - RNA, 19 nt, synthetic construct
  source 1..19: mol_type = other RNA
tcctccttagggtacttgt

SEQ ID NO: 248 - RNA, 19 nt, synthetic construct
  source 1..19: mol_type = other RNA
ttatctccgagtcctcctt

SEQ ID NO: 249 - RNA, 19 nt, synthetic construct
  source 1..19: mol_type = other RNA
ggcaggctccttatctccg

SEQ ID NO: 250 - RNA, 19 nt, synthetic construct
  source 1..19: mol_type = other RNA
cagacacatctggcaggct

SEQ ID NO: 251 - RNA, 19 nt, synthetic construct
  source 1..19: mol_type = other RNA
aaagtctgtagcagacaca

SEQ ID NO: 252 - RNA, 19 nt, synthetic construct
  source 1..19: mol_type = other RNA
tcaaccttctcaaagtctg

SEQ ID NO: 253 - RNA, 19 nt, synthetic construct
  source 1..19: mol_type = other RNA
aactgggtcagatcaacct

SEQ ID NO: 254 - RNA, 19 nt, synthetic construct
  source 1..19: mol_type = other RNA
ggatccacttgaactgggt

SEQ ID NO: 255 - RNA, 19 nt, synthetic construct
  source 1..19: mol_type = other RNA
ccctcaatgtggatccact

SEQ ID NO: 256 - RNA, 19 nt, synthetic construct
  source 1..19: mol_type = other RNA
gatgcgttccggccctcaa

SEQ ID NO: 257 - RNA, 19 nt, synthetic construct
  source 1..19: mol_type = other RNA
tcacctgctccgatgcgtt

SEQ ID NO: 258 - RNA, 19 nt, synthetic construct
  source 1..19: mol_type = other RNA
tgcagcatcttcacctgct

SEQ ID NO: 259 - RNA, 19 nt, synthetic construct
  source 1..19: mol_type = other RNA
gcgtctatccgctgcagca

SEQ ID NO: 260 - RNA, 19 nt, synthetic construct
  source 1..19: mol_type = other RNA
tggtgttgtgtgcgtctat

SEQ ID NO: 261 - RNA, 19 nt, synthetic construct
  source 1..19: mol_type = other RNA
tcttctgctctggaggctg

SEQ ID NO: 262 - RNA, 19 nt, synthetic construct
  source 1..19: mol_type = other RNA
acggacacccggatcttct

SEQ ID NO: 263 - RNA, 19 nt, synthetic construct
  source 1..19: mol_type = other RNA
tctccacctccacggacac

SEQ ID NO: 264 - RNA, 19 nt, synthetic construct
  source 1..19: mol_type = other RNA
tctcgtggcttctccacct

SEQ ID NO: 265 - RNA, 19 nt, synthetic construct
  source 1..19: mol_type = other RNA
ggaagagctcctctcgtgg

SEQ ID NO: 266 - RNA, 19 nt, synthetic construct
  source 1..19: mol_type = other RNA
ccaaacagctggaagagct

SEQ ID NO: 267 - RNA, 19 nt, synthetic construct
  source 1..19: mol_type = other RNA
acgtctccgtagccaaaca

SEQ ID NO: 268 - RNA, 19 nt, synthetic construct
  source 1..19: mol_type = other RNA
tgacaaacaccacgtctcc

SEQ ID NO: 269 - RNA, 19 nt, synthetic construct
  source 1..19: mol_type = other RNA
ccacatctttgctgacaaa

SEQ ID NO: 270 - RNA, 19 nt, synthetic construct
  source 1..19: mol_type = other RNA
agtgcttggccacatcttt

SEQ ID NO: 271 - RNA, 19 nt, synthetic construct
  source 1..19: mol_type = other RNA
actggaaccccaagtgctt

SEQ ID NO: 272 - RNA, 19 nt, synthetic construct
  source 1..19: mol_type = other RNA
cttcctctgctgactggaa

SEQ ID NO: 273 - RNA, 19 nt, synthetic construct
  source 1..19: mol_type = other RNA
gcccctcaaggcttcctct

SEQ ID NO: 274 - RNA, 19 nt, synthetic construct
  source 1..19: mol_type = other RNA
gaccatacaagcccctcaa

SEQ ID NO: 275 - RNA, 19 nt, synthetic construct
  source 1..19: mol_type = other RNA
ctttcctcacacgaccata

SEQ ID NO: 276 - RNA, 19 nt, synthetic construct
  source 1..19: mol_type = other RNA
agcacagcccctttcctca

SEQ ID NO: 277 - RNA, 19 nt, synthetic construct
  source 1..19: mol_type = other RNA
ctcctcagcccaggcacag

SEQ ID NO: 278 - RNA, 19 nt, synthetic construct
  source 1..19: mol_type = other RNA
ggcgtcggcgccctcctca

SEQ ID NO: 279 - RNA, 19 nt, synthetic construct
  source 1..19: mol_type = other RNA
tcagggcccagggcgtcgg

SEQ ID NO: 280 - RNA, 19 nt, synthetic construct
  source 1..19: mol_type = other RNA
aatttgccatcagggccca

SEQ ID NO: 281 - RNA, 19 nt, synthetic construct
  source 1..19: mol_type = other RNA
atccgagtggagcaatttg

SEQ ID NO: 282 - RNA, 19 nt, synthetic construct
  source 1..19: mol_type = other RNA
ggcgggaaagcatccgagt

SEQ ID NO: 283 - RNA, 19 nt, synthetic construct
  source 1..19: mol_type = other RNA
cacgcggggtggcgggaaa

SEQ ID NO: 284 - RNA, 19 nt, synthetic construct
  source 1..19: mol_type = other RNA
cagtgtatccaccacgcgg

SEQ ID NO: 285 - RNA, 19 nt, synthetic construct
  source 1..19: mol_type = other RNA
tctccagctcccagtgtat

SEQ ID NO: 286 - RNA, 19 nt, synthetic construct
  source 1..19: mol_type = other RNA
attgaaggtgtctccagct

SEQ ID NO: 287 - RNA, 19 nt, synthetic construct
  source 1..19: mol_type = other RNA
tgacggaggcattgaaggt

SEQ ID NO: 288 - RNA, 19 nt, synthetic construct
  source 1..19: mol_type = other RNA
agaggctgaagatgacgga

SEQ ID NO: 289 - RNA, 19 nt, synthetic construct
  source 1..19: mol_type = other RNA
tcctcccctgggagaggct

SEQ ID NO: 290 - RNA, 19 nt, synthetic construct
  source 1..19: mol_type = other RNA
aatctcagtgcttcctgca

SEQ ID NO: 291 - RNA, 19 nt, synthetic construct
  source 1..19: mol_type = other RNA
cctggcacccgaatctcag

SEQ ID NO: 292 - RNA, 19 nt, synthetic construct
  source 1..19: mol_type = other RNA
ttgccggccacctggcacc

SEQ ID NO: 293 - RNA, 19 nt, synthetic construct
  source 1..19: mol_type = other RNA
aagccctgcaggccacact

SEQ ID NO: 294 - RNA, 19 nt, synthetic construct
  source 1..19: mol_type = other RNA
cgatgccatcaaagccctg

SEQ ID NO: 295 - RNA, 19 nt, synthetic construct
  source 1..19: mol_type = other RNA
acctgctctcacacgatgc

SEQ ID NO: 296 - RNA, 19 nt, synthetic construct
  source 1..19: mol_type = other RNA
aggagccggcacctgctct

SEQ ID NO: 297 - RNA, 19 nt, synthetic construct
  source 1..19: mol_type = other RNA
atggtgtgtgaggagccgg

SEQ ID NO: 298 - RNA, 19 nt, synthetic construct
  source 1..19: mol_type = other RNA
tggtagtctccatggtgtg

SEQ ID NO: 299 - RNA, 19 nt, synthetic construct
  source 1..19: mol_type = other RNA
atgcagccgcaatggtagt

SEQ ID NO: 300 - RNA, 19 nt, synthetic construct
  source 1..19: mol_type = other RNA
ggagaaggcgatgcagccg

SEQ ID NO: 301 - RNA, 19 nt, synthetic construct
  source 1..19: mol_type = other RNA
ggctggatggaggggagaa

SEQ ID NO: 302 - RNA, 19 nt, synthetic construct
  source 1..19: mol_type = other RNA
cctggacgccaggctggat

SEQ ID NO: 303 - RNA, 19 nt, synthetic construct
  source 1..19: mol_type = other RNA
acagggcaacctggacgcc

SEQ ID NO: 304 - RNA, 19 nt, synthetic construct
  source 1..19: mol_type = other RNA
atctgtcccctgaacaggg

SEQ ID NO: 305 - RNA, 19 nt, synthetic construct
  source 1..19: mol_type = other RNA
acagcttgcatctgtcccc

SEQ ID NO: 306 - RNA, 19 nt, synthetic construct
  source 1..19: mol_type = other RNA
gagtcctccccacagcttg

SEQ ID NO: 307 - RNA, 19 nt, synthetic construct
  source 1..19: mol_type = other RNA
aggacacaggcagagtcct

SEQ ID NO: 308 - RNA, 19 nt, synthetic construct
  source 1..19: mol_type = other RNA
tggggaacacaggacacag

SEQ ID NO: 309 - RNA, 19 nt, synthetic construct
  source 1..19: mol_type = other RNA
agcctctccctgtggggaa

SEQ ID NO: 310 - RNA, 19 nt, synthetic construct
  source 1..19: mol_type = other RNA
ccatccccccagagcctct

SEQ ID NO: 311 - RNA, 19 nt, synthetic construct
  source 1..19: mol_type = other RNA
atcccccagccatcccccc

SEQ ID NO: 312 - RNA, 19 nt, synthetic construct
  source 1..19: mol_type = other RNA
tgaggctctgcatccccca

SEQ ID NO: 313 - RNA, 19 nt, synthetic construct
  source 1..19: mol_type = other RNA
atttatttgctctgaggct

SEQ ID NO: 314 - RNA, 19 nt, synthetic construct
  source 1..19: mol_type = other RNA
ctctgaggaagatttattt

SEQ ID NO: 315 - RNA, 19 nt, synthetic construct
  source 1..19: mol_type = other RNA
ggagaagctggctctgagg

SEQ ID NO: 316 - RNA, 19 nt, synthetic construct
  source 1..19: mol_type = other RNA
gacattgagaggagaagct

SEQ ID NO: 317 - RNA, 19 nt, synthetic construct
  source 1..19: mol_type = other RNA
agagcagttcagacattga

SEQ ID NO: 318 - RNA, 19 nt, synthetic construct
  source 1..19: mol_type = other RNA
ggaatgcccagccagagca

SEQ ID NO: 319 - RNA, 19 nt, synthetic construct
  source 1..19: mol_type = other RNA
agagcctcaggaatgccca

SEQ ID NO: 320 - RNA, 19 nt, synthetic construct
  source 1..19: mol_type = other RNA
atcgaagagtcagagcctc

SEQ ID NO: 321 - RNA, 19 nt, synthetic construct
  source 1..19: mol_type = other RNA
aggttaatttggggaatgg

SEQ ID NO: 322 - RNA, 19 nt, synthetic construct
  source 1..19: mol_type = other RNA
gcctgggcggagaggttaa

SEQ ID NO: 323 - RNA, 19 nt, synthetic construct
  source 1..19: mol_type = other RNA
ccctcctctgggcctgggc

SEQ ID NO: 324 - RNA, 19 nt, synthetic construct
  source 1..19: mol_type = other RNA
ccaggcagcccctcctctg

SEQ ID NO: 325 - RNA, 19 nt, synthetic construct
  source 1..19: mol_type = other RNA
cgctgctctagcccaggca

SEQ ID NO: 326 - RNA, 19 nt, synthetic construct
  source 1..19: mol_type = other RNA
gggcacttctcgctgctct

SEQ ID NO: 327 - RNA, 19 nt, synthetic construct
  source 1..19: mol_type = other RNA
tggcaagcccagggcactt

SEQ ID NO: 328 - RNA, 19 nt, synthetic construct
  source 1..19: mol_type = other RNA
agggcagagctggtggcaa

SEQ ID NO: 329 - RNA, 19 nt, synthetic construct
  source 1..19: mol_type = other RNA
ctccccagccagggcagag

SEQ ID NO: 330 - RNA, 19 nt, synthetic construct
  source 1..19: mol_type = other RNA
accgagtgtcctccccagc

SEQ ID NO: 331 - RNA, 19 nt, synthetic construct
  source 1..19: mol_type = other RNA
tggcaggttcactgggtgt

SEQ ID NO: 332 - RNA, 19 nt, synthetic construct
  source 1..19: mol_type = other RNA
acggtttctttggcaggtt

SEQ ID NO: 333 - RNA, 19 nt, synthetic construct
  source 1..19: mol_type = other RNA
aagagctctcacggtttct

SEQ ID NO: 334 - RNA, 19 nt, synthetic construct
  source 1..19: mol_type = other RNA
acgcagggccccgaagagc

SEQ ID NO: 335 - RNA, 19 nt, synthetic construct
  source 1..19: mol_type = other RNA
gagtctgcacaacgcaggg

SEQ ID NO: 336 - RNA, 19 nt, synthetic construct
  source 1..19: mol_type = other RNA
tgtgggaatagagtctgca

SEQ ID NO: 337 - RNA, 19 nt, synthetic construct
  source 1..19: mol_type = other RNA
agcttctgagctgtgggaa

SEQ ID NO: 338 - RNA, 19 nt, synthetic construct
  source 1..19: mol_type = other RNA
tgtggactcccagcttctg

SEQ ID NO: 339 - RNA, 19 nt, synthetic construct
  source 1..19: mol_type = other RNA
agctcagcggtgtggactc

SEQ ID NO: 340 - RNA, 19 nt, synthetic construct
  source 1..19: mol_type = other RNA
ggcctgtcagttcagctca

SEQ ID NO: 341 - RNA, 19 nt, synthetic construct
  source 1..19: mol_type = other RNA
gccccccactggcctgtca

SEQ ID NO: 342 - RNA, 19 nt, synthetic construct
  source 1..19: mol_type = other RNA
ggcgcacccctgcccccca

SEQ ID NO: 343 - RNA, 19 nt, synthetic construct
  source 1..19: mol_type = other RNA
agggcagaggaggcgcacc

SEQ ID NO: 344 - RNA, 19 nt, synthetic construct
  source 1..19: mol_type = other RNA
ggctggtgggcagggcaga

SEQ ID NO: 345 - RNA, 19 nt, synthetic construct
  source 1..19: mol_type = other RNA
catcaaatcacaggctggt

SEQ ID NO: 346 - RNA, 19 nt, synthetic construct
  source 1..19: mol_type = other RNA
tgaagaccccatcaaatca

SEQ ID NO: 347 - RNA, 19 nt, synthetic construct
  source 1..19: mol_type = other RNA
atttctggacaatgaagac

SEQ ID NO: 348 - RNA, 19 nt, synthetic construct
  source 1..19: mol_type = other RNA
gggaggaggtatttctgga

SEQ ID NO: 349 - RNA, 19 nt, synthetic construct
  source 1..19: mol_type = other RNA
ggggcagtcagcgggagga

SEQ ID NO: 350 - RNA, 19 nt, synthetic construct
  source 1..19: mol_type = other RNA
tttcaggctctggggcagt

SEQ ID NO: 351 - RNA, 19 nt, synthetic construct
  source 1..19: mol_type = other RNA
agggtgagactttcaggct

SEQ ID NO: 352 - RNA, 19 nt, synthetic construct
  source 1..19: mol_type = other RNA
aggtgggctccaagggtga

SEQ ID NO: 353 - RNA, 19 nt, synthetic construct
  source 1..19: mol_type = other RNA
cccttaattccaaggtggg

SEQ ID NO: 354 - RNA, 19 nt, synthetic construct
  source 1..19: mol_type = other RNA
tgaggcacgcccttaattc

SEQ ID NO: 355 - RNA, 19 nt, synthetic construct
  source 1..19: mol_type = other RNA
cacatttgtggctgaggca

SEQ ID NO: 356 - RNA, 19 nt, synthetic construct
  source 1..19: mol_type = other RNA
tatcctgggtcacatttgt

SEQ ID NO: 357 - RNA, 19 nt, synthetic construct
  source 1..19: mol_type = other RNA
agcaacactctgtatcctg

SEQ ID NO: 358 - RNA, 19 nt, synthetic construct
  source 1..19: mol_type = other RNA
ccctgaggacagcaacact

SEQ ID NO: 359 - RNA, 19 nt, synthetic construct
  source 1..19: mol_type = other RNA
agatcggacctccctgagg

SEQ ID NO: 360 - RNA, 19 nt, synthetic construct
  source 1..19: mol_type = other RNA
atatgtgttccagatcgga

SEQ ID NO: 361 - RNA, 19 nt, synthetic construct
  source 1..19: mol_type = other RNA
ccccaattccaatatgtgt

SEQ ID NO: 362 - RNA, 19 nt, synthetic construct
  source 1..19: mol_type = other RNA
atattggagttggccccaa

SEQ ID NO: 363 - RNA, 19 nt, synthetic construct
  source 1..19: mol_type = other RNA
acccaccctatattggagt

SEQ ID NO: 364 - RNA, 19 nt, synthetic construct
  source 1..19: mol_type = other RNA
attataaggccttacccac

SEQ ID NO: 365 - RNA, 19 nt, synthetic construct
  source 1..19: mol_type = other RNA
tgctctttacattataagg

SEQ ID NO: 366 - RNA, 19 nt, synthetic construct
  source 1..19: mol_type = other RNA
ctttacattatatgctctt

SEQ ID NO: 367 - RNA, 19 nt, synthetic construct
  source 1..19: mol_type = other RNA
tctaaagccctttacatta

SEQ ID NO: 368 - RNA, 19 nt, synthetic construct
  source 1..19: mol_type = other RNA
aggtctgtctcactctaaa

SEQ ID NO: 369 - RNA, 19 nt, synthetic construct
  source 1..19: mol_type = other RNA
gattttaatccaggtctgt

SEQ ID NO: 370 - RNA, 19 nt, synthetic construct
  source 1..19: mol_type = other RNA
attaaatggcagattttaa

SEQ ID NO: 371 - RNA, 19 nt, synthetic construct
  source 1..19: mol_type = other RNA
atatgcagctaattaaatg

SEQ ID NO: 372 - RNA, 19 nt, synthetic construct
  source 1..19: mol_type = other RNA
ttaagtgctgtaccctaag

SEQ ID NO: 373 - RNA, 19 nt, synthetic construct
  source 1..19: mol_type = other RNA
cagattgcgttaagtgctg

SEQ ID NO: 374 - RNA, 19 nt, synthetic construct
  source 1..19: mol_type = other RNA
agaaattgaggcagattgc

SEQ ID NO: 375 - RNA, 19 nt, synthetic construct
  source 1..19: mol_type = other RNA
tttgacagatgaagaaatt

SEQ ID NO: 376 - RNA, 19 nt, synthetic construct
  source 1..19: mol_type = other RNA
agccaagcagaattggttc

SEQ ID NO: 377 - RNA, 19 nt, synthetic construct
  source 1..19: mol_type = other RNA
acaataattctgtagccaa

SEQ ID NO: 378 - RNA, 19 nt, synthetic construct
  source 1..19: mol_type = other RNA
attttatcctcacaataat

SEQ ID NO: 379 - RNA, 19 nt, synthetic construct
  source 1..19: mol_type = other RNA
ttatatatgattttatcct

SEQ ID NO: 380 - RNA, 19 nt, synthetic construct
  source 1..19: mol_type = other RNA
atgctgggcattttatata

SEQ ID NO: 381 - DNA, 21 bp, synthetic construct
  source 1..21: mol_type = other DNA
  modified_base 1: mod_base = OTHER; note = adenosine-3'-phosphate
  modified_base 2: mod_base = OTHER; note = guanosine-3'-phosphate
  modified_base 3: mod_base = OTHER; note = guanosine-3'-phosphate
  modified_base 4: mod_base = OTHER; note = cytidine-3'-phosphate
  modified_base 5: mod_base = OTHER; note = adenosine-3'-phosphate
  modified_base 6: mod_base = OTHER; note = guanosine-3'-phosphate
  modified_base 7: mod_base = OTHER; note = guanosine-3'-phosphate
  modified_base 8: mod_base = OTHER; note = guanosine-3'-phosphate
  modified_base 9: mod_base = OTHER; note = cytidine-3'-phosphate
  modified_base 10: mod_base = OTHER; note = uridine-3'-phosphate
  modified_base 11: mod_base = OTHER; note = guanosine-3'-phosphate
  modified_base 12: mod_base = OTHER; note = cytidine-3'-phosphate
  modified_base 13: mod_base = OTHER; note = adenosine-3'-phosphate
  modified_base 14: mod_base = OTHER; note = guanosine-3'-phosphate
  modified_base 15: mod_base = OTHER; note = adenosine-3'-phosphate
  modified_base 16: mod_base = OTHER; note = uridine-3'-phosphate
  modified_base 17: mod_base = OTHER; note = guanosine-3'-phosphate
  modified_base 18: mod_base = OTHER; note = cytidine-3'-phosphate
  modified_base 19: mod_base = OTHER; note = guanosine-3'-phosphate
  misc_feature 1..19: note = RNA
  misc_feature 20..21: note = DNA
aggcagggctgcagatgcgtt

SEQ ID NO: 382 - DNA, 21 bp, synthetic construct
  source 1..21: mol_type = other DNA
  modified_base 1: mod_base = OTHER; note = guanosine-3'-phosphate
  modified_base 2: mod_base = OTHER; note = cytidine-3'-phosphate
  modified_base 3: mod_base = OTHER; note = adenosine-3'-phosphate
  modified_base 4: mod_base = OTHER; note = guanosine-3'-phosphate
  modified_base 5: mod_base = OTHER; note = adenosine-3'-phosphate
  modified_base 6: mod_base = OTHER; note = uridine-3'-phosphate
  modified_base 7: mod_base = OTHER; note = guanosine-3'-phosphate
  modified_base 8: mod_base = OTHER; note = cytidine-3'-phosphate
  modified_base 9: mod_base = OTHER; note = guanosine-3'-phosphate
  modified_base 10: mod_base = OTHER; note = adenosine-3'-phosphate
  modified_base 11: mod_base = OTHER; note = guanosine-3'-phosphate
  modified_base 12: mod_base = OTHER; note = guanosine-3'-phosphate
  modified_base 13: mod_base = OTHER; note = cytidine-3'-phosphate
  modified_base 14: mod_base = OTHER; note = cytidine-3'-phosphate
  modified_base 15: mod_base = OTHER; note = cytidine-3'-phosphate
  modified_base 16: mod_base = OTHER; note = adenosine-3'-phosphate
  modified_base 17: mod_base = OTHER; note = guanosine-3'-phosphate
  modified_base 18: mod_base = OTHER; note = cytidine-3'-phosphate
  modified_base 19: mod_base = OTHER; note = uridine-3'-phosphate
  misc_feature 1..19: note = RNA
  misc_feature 20..21: note = DNA
gcagatgcgaggcccagcttt

SEQ ID NO: 383 - DNA, 21 bp, synthetic construct
  source 1..21: mol_type = other DNA
  modified_base 1: mod_base = OTHER; note = guanosine-3'-phosphate
  modified_base 2: mod_base = OTHER; note = cytidine-3'-phosphate
  modified_base 3: mod_base = OTHER; note = cytidine-3'-phosphate
  modified_base 4: mod_base = OTHER; note = cytidine-3'-phosphate
  modified_base 5: mod_base = OTHER; note = adenosine-3'-phosphate
  modified_base 6: mod_base = OTHER; note = guanosine-3'-phosphate
  modified_base 7: mod_base = OTHER; note = cytidine-3'-phosphate
  modified_base 8: mod_base = OTHER; note = uridine-3'-phosphate
  modified_base 9: mod_base = OTHER; note = guanosine-3'-phosphate
  modified_base 10: mod_base = OTHER; note = uridine-3'-phosphate
  modified_base 11: mod_base = OTHER; note = adenosine-3'-phosphate
  modified_base 12: mod_base = OTHER; note = cytidine-3'-phosphate
  modified_base 13: mod_base = OTHER; note = cytidine-3'-phosphate
  modified_base 14: mod_base = OTHER; note = uridine-3'-phosphate
  modified_base 15: mod_base = OTHER; note = cytidine-3'-phosphate
  modified_base 16: mod_base = OTHER; note = guanosine-3'-phosphate
  modified_base 17: mod_base = OTHER; note = cytidine-3'-phosphate
  modified_base 18: mod_base = OTHER; note = guanosine-3'-phosphate
  modified_base 19: mod_base = OTHER; note = uridine-3'-phosphate
  misc_feature 1..19: note = RNA
  misc_feature 20..21: note = DNA
gcccagctgtacctcgcgttt

SEQ ID NO: 384 - DNA, 21 bp, synthetic construct
  source 1..21: mol_type = other DNA
  modified_base 1: mod_base = OTHER; note = adenosine-3'-phosphate
  modified_base 2: mod_base = OTHER; note = cytidine-3'-phosphate
  modified_base 3: mod_base = OTHER; note = cytidine-3'-phosphate
  modified_base 4: mod_base = OTHER; note = uridine-3'-phosphate
  modified_base 5: mod_base = OTHER; note = cytidine-3'-phosphate
  modified_base 6: mod_base = OTHER; note = guanosine-3'-phosphate
  modified_base 7: mod_base = OTHER; note = cytidine-3'-phosphate
  modified_base 8: mod_base = OTHER; note = guanosine-3'-phosphate
  modified_base 9: mod_base = OTHER; note = uridine-3'-phosphate
  modified_base 10: mod_base = OTHER; note = guanosine-3'-phosphate
  modified_base 11: mod_base = OTHER; note = uridine-3'-phosphate
  modified_base 12: mod_base = OTHER; note = cytidine-3'-phosphate
  modified_base 13: mod_base = OTHER; note = cytidine-3'-phosphate
  modified_base 14: mod_base = OTHER; note = cytidine-3'-phosphate
  modified_base 15: mod_base = OTHER; note = guanosine-3'-phosphate
  modified_base 16: mod_base = OTHER; note = guanosine-3'-phosphate
  modified_base 17: mod_base = OTHER; note = guanosine-3'-phosphate
  modified_base 18: mod_base = OTHER; note = uridine-3'-phosphate
  modified_base 19: mod_base = OTHER; note = cytidine-3'-phosphate
  misc_feature 1..19: note = RNA
  misc_feature 20..21: note = DNA
acctcgcgtgtcccgggtctt

SEQ ID NO: 385 - DNA, 21 bp, synthetic construct
  source 1..21: mol_type = other DNA
  modified_base 1: mod_base = OTHER; note = cytidine-3'-phosphate
  modified_base 2: mod_base = OTHER; note = cytidine-3'-phosphate
  modified_base 3: mod_base = OTHER; note = guanosine-3'-phosphate
  modified_base 4: mod_base = OTHER; note = guanosine-3'-phosphate
  modified_base 5: mod_base = OTHER; note = guanosine-3'-phosphate
  modified_base 6: mod_base = OTHER; note = uridine-3'-phosphate
  modified_base 7: mod_base = OTHER; note = cytidine-3'-phosphate
  modified_base 8: mod_base = OTHER; note = guanosine-3'-phosphate
  modified_base 9: mod_base = OTHER; note = guanosine-3'-phosphate
  modified_base 10: mod_base = OTHER; note = guanosine-3'-phosphate
  modified_base 11: mod_base = OTHER; note = adenosine-3'-phosphate
  modified_base 12: mod_base = OTHER; note = guanosine-3'-phosphate
  modified_base 13: mod_base = OTHER; note = uridine-3'-phosphate
  modified_base 14: mod_base = OTHER; note = cytidine-3'-phosphate
  modified_base 15: mod_base = OTHER; note = guanosine-3'-phosphate
  modified_base 16: mod_base = OTHER; note = guanosine-3'-phosphate
  modified_base 17: mod_base = OTHER; note = adenosine-3'-phosphate
  modified_base 18: mod_base = OTHER; note = guanosine-3'-phosphate
  modified_base 19: mod_base = OTHER; note = adenosine-3'-phosphate
  misc_feature 1..19: note = RNA
  misc_feature 20..21: note = DNA
ccgggtcgggagtcggagatt

SEQ ID NO: 386 - DNA, 21 bp, synthetic construct
  source 1..21: mol_type = other DNA
  modified_base 1: mod_base = OTHER; note = uridine-3'-phosphate
  modified_base 2: mod_base = OTHER; note = cytidine-3'-phosphate
  modified_base 3: mod_base = OTHER; note = guanosine-3'-phosphate
  modified_base 4: mod_base = OTHER; note = guanosine-3'-phosphate
  modified_base 5: mod_base = OTHER; note = adenosine-3'-phosphate
  modified_base 6: mod_base = OTHER; note = guanosine-3'-phosphate
  modified_base 7: mod_base = OTHER; note = adenosine-3'-phosphate
  modified_base 8: mod_base = OTHER; note = cytidine-3'-phosphate
  modified_base 9: mod_base = OTHER; note = guanosine-3'-phosphate
  modified_base 10: mod_base = OTHER; note = cytidine-3'-phosphate
  modified_base 11: mod_base = OTHER; note = adenosine-3'-phosphate
  modified_base 12: mod_base = OTHER; note = guanosine-3'-phosphate
  modified_base 13: mod_base = OTHER; note = guanosine-3'-phosphate
  modified_base 14: mod_base = OTHER; note = uridine-3'-phosphate
  modified_base 15: mod_base = OTHER; note = guanosine-3'-phosphate
  modified_base 16: mod_base = OTHER; note = cytidine-3'-phosphate
  modified_base 17: mod_base = OTHER; note = adenosine-3'-phosphate
  modified_base 18: mod_base = OTHER; note = guanosine-3'-phosphate
  modified_base 19: mod_base = OTHER; note = guanosine-3'-phosphate
  misc_feature 1..19: note = RNA
  misc_feature 20..21: note = DNA
tcggagacgcaggtgcaggtt

SEQ ID NO: 387 - DNA, 21 bp, synthetic construct
  source 1..21: mol_type = other DNA
  modified_base 1: mod_base = OTHER; note = cytidine-3'-phosphate
  modified_base 2: mod_base = OTHER; note = adenosine-3'-phosphate
  modified_base 3: mod_base = OTHER; note = guanosine-3'-phosphate
  modified_base 4: mod_base = OTHER; note = guanosine-3'-phosphate
  modified_base 5: mod_base = OTHER; note = uridine-3'-phosphate
  modified_base 6: mod_base = OTHER; note = guanosine-3'-phosphate
  modified_base 7: mod_base = OTHER; note = cytidine-3'-phosphate
  modified_base 8: mod_base = OTHER; note = adenosine-3'-phosphate
  modified_base 9: mod_base = OTHER; note = guanosine-3'-phosphate
  modified_base 10: mod_base = OTHER; note = guanosine-3'-phosphate
  modified_base 11: mod_base = OTHER; note = adenosine-3'-phosphate
  modified_base 12: mod_base = OTHER; note = guanosine-3'-phosphate
  modified_base 13: mod_base = OTHER; note = adenosine-3'-phosphate
  modified_base 14: mod_base = OTHER; note = guanosine-3'-phosphate
  modified_base 15: mod_base = OTHER; note = uridine-3'-phosphate
  modified_base 16: mod_base = OTHER; note = guanosine-3'-phosphate
  modified_base 17: mod_base = OTHER; note = cytidine-3'-phosphate
  modified_base 18: mod_base = OTHER; note = guanosine-3'-phosphate
  modified_base 19: mod_base = OTHER; note = guanosine-3'-phosphate
  misc_feature 1..19: note = RNA
  misc_feature 20..21: note = DNA
caggtgcaggagagtgcggtt

SEQ ID NO: 388 - DNA, 21 bp, synthetic construct
  source 1..21: mol_type = other DNA
  modified_base 1: mod_base = OTHER; note = adenosine-3'-phosphate
  modified_base 2: mod_base = OTHER; note = guanosine-3'-phosphate
  modified_base 3: mod_base = OTHER; note = uridine-3'-phosphate
  modified_base 4: mod_base = OTHER; note = guanosine-3'-phosphate
  modified_base 5: mod_base = OTHER; note = cytidine-3'-phosphate
  modified_base 6: mod_base = OTHER; note = guanosine-3'-phosphate
  modified_base 7: mod_base = OTHER; note = guanosine-3'-phosphate
  modified_base 8: mod_base = OTHER; note = guanosine-3'-phosphate
  modified_base 9: mod_base = OTHER; note = guanosine-3'-phosphate
  modified_base 10: mod_base = OTHER; note = cytidine-3'-phosphate
  modified_base 11: mod_base = OTHER; note = adenosine-3'-phosphate
  modified_base 12: mod_base = OTHER; note = adenosine-3'-phosphate
  modified_base 13: mod_base = OTHER; note = guanosine-3'-phosphate
  modified_base 14: mod_base = OTHER; note = uridine-3'-phosphate
  modified_base 15: mod_base = OTHER; note = adenosine-3'-phosphate
  modified_base 16: mod_base = OTHER; note = guanosine-3'-phosphate
  modified_base 17: mod_base = OTHER; note = cytidine-3'-phosphate
  modified_base 18: mod_base = OTHER; note = guanosine-3'-phosphate
  modified_base 19: mod_base = OTHER; note = cytidine-3'-phosphate
  misc_feature 1..19: note = RNA
  misc_feature 20..21: note = DNA
agtgcggggcaagtagcgctt

SEQ ID NO: 389 - DNA, 21 bp, synthetic construct
  source 1..21: mol_type = other DNA
  modified_base 1: mod_base = OTHER; note = adenosine-3'-phosphate
  modified_base 2: mod_base = OTHER; note = adenosine-3'-phosphate
  modified_base 3: mod_base = OTHER; note = guanosine-3'-phosphate
  modified_base 4: mod_base = OTHER; note = uridine-3'-phosphate
  modified_base 5: mod_base = OTHER; note = adenosine-3'-phosphate
  modified_base 6: mod_base = OTHER; note = guanosine-3'-phosphate
  modified_base 7: mod_base = OTHER; note = cytidine-3'-phosphate
  modified_base 8: mod_base = OTHER; note = guanosine-3'-phosphate
  modified_base 9: mod_base = OTHER; note = cytidine-3'-phosphate
  modified_base 10: mod_base = OTHER; note = adenosine-3'-phosphate
  modified_base 11: mod_base = OTHER; note = uridine-3'-phosphate
  modified_base 12: mod_base = OTHER; note = uridine-3'-phosphate
  modified_base 13: mod_base = OTHER; note = uridine-3'-phosphate
  modified_base 14: mod_base = OTHER; note = uridine-3'-phosphate
  modified_base 15: mod_base = OTHER; note = cytidine-3'-phosphate
  modified_base 16: mod_base = OTHER; note = uridine-3'-phosphate
  modified_base 17: mod_base = OTHER; note = cytidine-3'-phosphate
  modified_base 18: mod_base = OTHER; note = uridine-3'-phosphate
  modified_base 19: mod_base = OTHER; note = uridine-3'-phosphate
  misc_feature 1..19: note = RNA
  misc_feature 20..21: note = DNA
aagtagcgcattttctctttt

SEQ ID NO: 390 - DNA, 21 bp, synthetic construct
  source 1..21: mol_type = other DNA
  modified_base 1: mod_base = OTHER; note = uridine-3'-phosphate
  modified_base 2: mod_base = OTHER; note = uridine-3'-phosphate
  modified_base 3: mod_base = OTHER; note = cytidine-3'-phosphate
  modified_base 4: mod_base = OTHER; note = uridine-3'-phosphate
  modified_base 5: mod_base = OTHER; note = cytidine-3'-phosphate
  modified_base 6: mod_base = OTHER; note = uridine-3'-phosphate
  modified_base 7: mod_base = OTHER; note = uridine-3'-phosphate
  modified_base 8: mod_base = OTHER; note = uridine-3'-phosphate
  modified_base 9: mod_base = OTHER; note = guanosine-3'-phosphate
  modified_base 10: mod_base = OTHER; note = cytidine-3'-phosphate
  modified_base 11: mod_base = OTHER; note = adenosine-3'-phosphate
  modified_base 12: mod_base = OTHER; note = uridine-3'-phosphate
  modified_base 13: mod_base = OTHER; note = uridine-3'-phosphate
  modified_base 14: mod_base = OTHER; note = cytidine-3'-phosphate
  modified_base 15: mod_base = OTHER; note = uridine-3'-phosphate
  modified_base 16: mod_base = OTHER; note = cytidine-3'-phosphate
  modified_base 17: mod_base = OTHER; note = guanosine-3'-phosphate
  modified_base 18: mod_base = OTHER; note = adenosine-3'-phosphate
  modified_base 19: mod_base = OTHER; note = guanosine-3'-phosphate
  misc_feature 1..19: note = RNA
  misc_feature 20..21: note = DNA
ttctctttgcattctcgagtt

SEQ ID NO: 391 - DNA, 21 bp, synthetic construct
  source 1..21: mol_type = other DNA
  modified_base 1: mod_base = OTHER; note = uridine-3'-phosphate
  modified_base 2: mod_base = OTHER; note = uridine-3'-phosphate
  modified_base 3: mod_base = OTHER; note = cytidine-3'-phosphate
  modified_base 4: mod_base = OTHER; note = uridine-3'-phosphate
  modified_base 5: mod_base = OTHER; note = cytidine-3'-phosphate
  modified_base 6: mod_base = OTHER; note = guanosine-3'-phosphate
  modified_base 7: mod_base = OTHER; note = adenosine-3'-phosphate
  modified_base 8: mod_base = OTHER; note = guanosine-3'-phosphate
  modified_base 9: mod_base = OTHER; note = adenosine-3'-phosphate
  modified_base 10: mod_base = OTHER; note = uridine-3'-phosphate
  modified_base 11: mod_base = OTHER; note = cytidine-3'-phosphate
  modified_base 12: mod_base = OTHER; note = guanosine-3'-phosphate
  modified_base 13: mod_base = OTHER; note = cytidine-3'-phosphate
  modified_base 14: mod_base = OTHER; note = uridine-3'-phosphate
  modified_base 15: mod_base = OTHER; note = uridine-3'-phosphate
  modified_base 16: mod_base = OTHER; note = adenosine-3'-phosphate
  modified_base 17: mod_base = OTHER; note = guanosine-3'-phosphate
  modified_base 18: mod_base = OTHER; note = cytidine-3'-phosphate
  modified_base 19: mod_base = OTHER; note = cytidine-3'-phosphate
  misc_feature 1..19: note = RNA
  misc_feature 20..21: note = DNA
ttctcgagatcgcttagcctt

SEQ ID NO: 392 - DNA, 21 bp, synthetic construct
  source 1..21: mol_type = other DNA
  modified_base 1: mod_base = OTHER; note = uridine-3'-phosphate
  modified_base 2: mod_base = OTHER; note = uridine-3'-phosphate
  modified_base 3: mod_base = OTHER; note = uridine-3'-phosphate
  modified_base 4: mod_base = OTHER; note = adenosine-3'-phosphate
  modified_base 5: mod_base = OTHER; note = adenosine-3'-phosphate
  modified_base 6: mod_base = OTHER; note = adenosine-3'-phosphate
  modified_base 7: mod_base = OTHER; note = adenosine-3'-phosphate
  modified_base 8: mod_base = OTHER; note = adenosine-3'-phosphate
  modified_base 9: mod_base = OTHER; note = guanosine-3'-phosphate
  modified_base 10: mod_base = OTHER; note = guanosine-3'-phosphate
  modified_base 11: mod_base = OTHER; note = uridine-3'-phosphate
  modified_base 12: mod_base = OTHER; note = uridine-3'-phosphate
  modified_base 13: mod_base = OTHER; note = uridine-3'-phosphate
  modified_base 14: mod_base = OTHER; note = guanosine-3'-phosphate
  modified_base 15: mod_base = OTHER; note = cytidine-3'-phosphate
  modified_base 16: mod_base = OTHER; note = adenosine-3'-phosphate
  modified_base 17: mod_base = OTHER; note = uridine-3'-phosphate
  modified_base 18: mod_base = OTHER; note = cytidine-3'-phosphate
  modified_base 19: mod_base = OTHER; note = adenosine-3'-phosphate
  misc_feature 1..19: note = RNA
  misc_feature 20..21: note = DNA
tttaaaaaggtttgcatcatt

SEQ ID NO: 393 - DNA, 21 bp, synthetic construct
  source 1..21: mol_type = other DNA
  modified_base 1: mod_base = OTHER; note = uridine-3'-phosphate
  modified_base 2: mod_base = OTHER; note = uridine-3'-phosphate
  modified_base 3: mod_base = OTHER; note = guanosine-3'-phosphate
  modified_base 4: mod_base = OTHER; note = cytidine-3'-phosphate
  modified_base 5: mod_base = OTHER; note = adenosine-3'-phosphate
  modified_base 6: mod_base = OTHER; note = uridine-3'-phosphate
  modified_base 7: mod_base = OTHER; note = cytidine-3'-phosphate
  modified_base 8: mod_base = OTHER; note = adenosine-3'-phosphate
  modified_base 9: mod_base = OTHER; note = guanosine-3'-phosphate
  modified_base 10: mod_base = OTHER; note = cytidine-3'-phosphate
  modified_base 11: mod_base = OTHER; note = uridine-3'-phosphate
  modified_base 12: mod_base = OTHER; note = guanosine-3'-phosphate
  modified_base 13: mod_base = OTHER; note = uridine-3'-phosphate
  modified_base 14: mod_base = OTHER; note = guanosine-3'-phosphate
  modified_base 15: mod_base = OTHER; note = adenosine-3'-phosphate
  modified_base 16: mod_base = OTHER; note = guanosine-3'-phosphate
  modified_base 17: mod_base = OTHER; note = uridine-3'-phosphate
  modified_base 18: mod_base = OTHER; note = cytidine-3'-phosphate
  modified_base 19: mod_base = OTHER; note = cytidine-3'-phosphate
  misc_feature 1..19: note = RNA
  misc_feature 20..21: note = DNA
ttgcatcagctgtgagtcctt

SEQ ID NO: 394 - DNA, 21 bp, synthetic construct
  source 1..21: mol_type = other DNA
  modified_base 1: mod_base = OTHER; note = uridine-3'-phosphate
  modified_base 2: mod_base = OTHER; note = guanosine-3'-phosphate
  modified_base 3: mod_base = OTHER; note = uridine-3'-phosphate
  modified_base 4: mod_base = OTHER; note = guanosine-3'-phosphate
  modified_base 5: mod_base = OTHER; note = adenosine-3'-phosphate
  modified_base 6: mod_base = OTHER; note = guanosine-3'-phosphate
  modified_base 7: mod_base = OTHER; note = uridine-3'-phosphate
  modified_base 8: mod_base = OTHER; note = cytidine-3'-phosphate
  modified_base 9: mod_base = OTHER; note = cytidine-3'-phosphate
  modified_base 10: mod_base = OTHER; note = adenosine-3'-phosphate
  modified_base 11: mod_base = OTHER; note = uridine-3'-phosphate
  modified_base 12: mod_base = OTHER; note = cytidine-3'-phosphate
  modified_base 13: mod_base = OTHER; note = uridine-3'-phosphate
  modified_base 14: mod_base = OTHER; note = guanosine-3'-phosphate
  modified_base 15: mod_base = OTHER; note = adenosine-3'-phosphate
  modified_base 16: mod_base = OTHER; note = cytidine-3'-phosphate
  modified_base 17: mod_base = OTHER; note = adenosine-3'-phosphate
  modified_base 18: mod_base = OTHER; note = adenosine-3'-phosphate
  modified_base 19: mod_base = OTHER; note = guanosine-3'-phosphate
  misc_feature 1..19: note = RNA
  misc_feature 20..21: note = DNA
tgtgagtccatctgacaagtt

SEQ ID NO: 395 - DNA, 21 bp, synthetic construct
  source 1..21: mol_type = other DNA
  modified_base 1: mod_base = OTHER; note = uridine-3'-phosphate
  modified_base 2: mod_base = OTHER; note = cytidine-3'-phosphate
  modified_base 3: mod_base = OTHER; note = uridine-3'-phosphate
  modified_base 4: mod_base = OTHER; note = guanosine-3'-phosphate
  modified_base 5: mod_base = OTHER; note = adenosine-3'-phosphate
  modified_base 6: mod_base = OTHER; note = cytidine-3'-phosphate
  modified_base 7: mod_base = OTHER; note = adenosine-3'-phosphate
  modified_base 8: mod_base = OTHER; note = adenosine-3'-phosphate
  modified_base 9: mod_base = OTHER; note = guanosine-3'-phosphate
  modified_base 10: mod_base = OTHER; note = cytidine-3'-phosphate
  modified_base 11: mod_base = OTHER; note = guanosine-3'-phosphate
  modified_base 12: mod_base = OTHER; note = adenosine-3'-phosphate
  modified_base 13: mod_base = OTHER; note = guanosine-3'-phosphate
  modified_base 14: mod_base = OTHER; note = guanosine-3'-phosphate
  modified_base 15: mod_base = OTHER; note = adenosine-3'-phosphate
  modified_base 16: mod_base = OTHER; note = adenosine-3'-phosphate
  modified_base 17: mod_base = OTHER; note = adenosine-3'-phosphate
  modified_base 18: mod_base = OTHER; note = cytidine-3'-phosphate
  modified_base 19: mod_base = OTHER; note = uridine-3'-phosphate
  misc_feature 1..19: note = RNA
  misc_feature 20..21: note = DNA
tctgacaagcgaggaaacttt

SEQ ID NO: 396 - DNA, 21 bp, synthetic construct
  source 1..21: mol_type = other DNA
  modified_base 1: mod_base = OTHER; note = guanosine-3'-phosphate
  modified_base 2: mod_base = OTHER; note = adenosine-3'-phosphate
  modified_base 3: mod_base = OTHER; note = adenosine-3'-phosphate
  modified_base 4: mod_base = OTHER; note = adenosine-3'-phosphate
  modified_base 5: mod_base = OTHER; note = cytidine-3'-phosphate
  modified_base 6: mod_base = OTHER; note = uridine-3'-phosphate
  modified_base 7: mod_base = OTHER; note = adenosine-3'-phosphate
  modified_base 8: mod_base = OTHER; note = adenosine-3'-phosphate
  modified_base 9: mod_base = OTHER; note = guanosine-3'-phosphate
  modified_base 10: mod_base = OTHER; note = guanosine-3'-phosphate
  modified_base 11: mod_base = OTHER; note = cytidine-3'-phosphate
  modified_base 12: mod_base = OTHER; note = uridine-3'-phosphate
  modified_base 13: mod_base = OTHER; note = guanosine-3'-phosphate
  modified_base 14: mod_base = OTHER; note = adenosine-3'-phosphate
  modified_base 15: mod_base = OTHER; note = guanosine-3'-phosphate
  modified_base 16: mod_base = OTHER; note = adenosine-3'-phosphate
  modified_base 17: mod_base = OTHER; note = adenosine-3'-phosphate
  modified_base 18: mod_base = OTHER; note = guanosine-3'-phosphate
  modified_base 19: mod_base = OTHER; note = uridine-3'-phosphate
  misc_feature 1..19: note = RNA
  misc_feature 20..21: note = DNA
gaaactaaggctgagaagttt

SEQ ID NO: 397 - DNA, 21 bp, synthetic construct
  source 1..21: mol_type = other DNA
  modified_base 1: mod_base = OTHER; note = cytidine-3'-phosphate
  modified_base 2: mod_base = OTHER; note = uridine-3'-phosphate
  modified_base 3: mod_base = OTHER; note = guanosine-3'-phosphate
  modified_base 4: mod_base = OTHER; note = adenosine-3'-phosphate
  modified_base 5: mod_base = OTHER; note = guanosine-3'-phosphate
  modified_base 6: mod_base = OTHER; note = adenosine-3'-phosphate
  modified_base 7: mod_base = OTHER; note = adenosine-3'-phosphate
  modified_base 8: mod_base = OTHER; note = guanosine-3'-phosphate
  modified_base 9: mod_base = OTHER; note = uridine-3'-phosphate
  modified_base 10: mod_base = OTHER; note = guanosine-3'-phosphate
  modified_base 11: mod_base = OTHER; note = guanosine-3'-phosphate
  modified_base 12: mod_base = OTHER; note = guanosine-3'-phosphate
  modified_base 13: mod_base = OTHER; note = adenosine-3'-phosphate
  modified_base 14: mod_base = OTHER; note = guanosine-3'-phosphate
  modified_base 15: mod_base = OTHER; note = guanosine-3'-phosphate
  modified_base 16: mod_base = OTHER; note = cytidine-3'-phosphate
  modified_base 17: mod_base = OTHER; note = guanosine-3'-phosphate
  modified_base 18: mod_base = OTHER; note = uridine-3'-phosphate
  modified_base 19: mod_base = OTHER; note = uridine-3'-phosphate
  misc_feature 1..19: note = RNA
  misc_feature 20..21: note = DNA
ctgagaagtgggaggcgtttt

SEQ ID NO: 398 - DNA, 21 bp, synthetic construct
  source 1..21: mol_type = other DNA
  modified_base 1: mod_base = OTHER; note = adenosine-3'-phosphate
  modified_base 2: mod_base = OTHER; note = guanosine-3'-phosphate
  modified_base 3: mod_base = OTHER; note = guanosine-3'-phosphate
  modified_base 4: mod_base = OTHER; note = cytidine-3'-phosphate
  modified_base 5: mod_base = OTHER; note = guanosine-3'-phosphate
  modified_base 6: mod_base = OTHER; note = uridine-3'-phosphate
  modified_base 7: mod_base = OTHER; note = uridine-3'-phosphate
  modified_base 8: mod_base = OTHER; note = guanosine-3'-phosphate
  modified_base 9: mod_base = OTHER; note = cytidine-3'-phosphate
  modified_base 10: mod_base = OTHER; note = cytidine-3'-phosphate
  modified_base 11: mod_base = OTHER; note = adenosine-3'-phosphate
  modified_base 12: mod_base = OTHER; note = uridine-3'-phosphate
  modified_base 13: mod_base = OTHER; note = cytidine-3'-phosphate
  modified_base 14: mod_base = OTHER; note = uridine-3'-phosphate
  modified_base 15: mod_base = OTHER; note = guanosine-3'-phosphate
  modified_base 16: mod_base = OTHER; note = cytidine-3'-phosphate
  modified_base 17: mod_base = OTHER; note = adenosine-3'-phosphate
  modified_base 18: mod_base = OTHER; note = guanosine-3'-phosphate
  modified_base 19: mod_base = OTHER; note = guanosine-3'-phosphate
  misc_feature 1..19: note = RNA
  misc_feature 20..21: note = DNA
aggcgttgccatctgcaggtt

SEQ ID NO: 399 - DNA, 21 bp, synthetic construct
  source 1..21: mol_type = other DNA
  modified_base 1: mod_base = OTHER; note = uridine-3'-phosphate
  modified_base 2: mod_base = OTHER; note = cytidine-3'-phosphate
  modified_base 3: mod_base = OTHER; note = uridine-3'-phosphate
  modified_base 4: mod_base = OTHER; note = guanosine-3'-phosphate
  modified_base 5: mod_base = OTHER; note = cytidine-3'-phosphate
  modified_base 6: mod_base = OTHER; note = adenosine-3'-phosphate
  modified_base 7: mod_base = OTHER; note = guanosine-3'-phosphate
  modified_base 8: mod_base = OTHER; note = guanosine-3'-phosphate
  modified_base 9: mod_base = OTHER; note = cytidine-3'-phosphate
  modified_base 10: mod_base = OTHER; note = cytidine-3'-phosphate
  modified_base 11: mod_base = OTHER; note = cytidine-3'-phosphate
  modified_base 12: mod_base = OTHER; note = adenosine-3'-phosphate
  modified_base 13: mod_base = OTHER; note = guanosine-3'-phosphate
  modified_base 14: mod_base = OTHER; note = guanosine-3'-phosphate
  modified_base 15: mod_base = OTHER; note = cytidine-3'-phosphate
  modified_base 16: mod_base = OTHER; note = adenosine-3'-phosphate
  modified_base 17: mod_base = OTHER; note = adenosine-3'-phosphate
  modified_base 18: mod_base = OTHER; note = cytidine-3'-phosphate
  modified_base 19: mod_base = OTHER; note = cytidine-3'-phosphate
  misc_feature 1..19: note = RNA
  misc_feature 20..21: note = DNA
tctgcaggcccaggcaacctt

SEQ ID NO: 400 - DNA, 21 bp, synthetic construct
  source 1..21: mol_type = other DNA
  modified_base 1: mod_base = OTHER; note = adenosine-3'-phosphate
  modified_base 2: mod_base = OTHER; note = guanosine-3'-phosphate
  modified_base 3: mod_base = OTHER; note = guanosine-3'-phosphate
  modified_base 4: mod_base = OTHER; note = cytidine-3'-phosphate
  modified_base 5: mod_base = OTHER; note = adenosine-3'-phosphate
  modified_base 6: mod_base = OTHER; note = adenosine-3'-phosphate
  modified_base 7: mod_base = OTHER; note = cytidine-3'-phosphate
  modified_base 8: mod_base = OTHER; note = cytidine-3'-phosphate
  modified_base 9: mod_base = OTHER; note = uridine-3'-phosphate
  modified_base 10: mod_base = OTHER; note = guanosine-3'-phosphate
  modified_base 11: mod_base = OTHER; note = cytidine-3'-phosphate
  modified_base 12: mod_base = OTHER; note = uridine-3'-phosphate
  modified_base 13: mod_base = OTHER; note = adenosine-3'-phosphate
  modified_base 14: mod_base = OTHER; note = cytidine-3'-phosphate
  modified_base 15: mod_base = OTHER; note = guanosine-3'-phosphate
  modified_base 16: mod_base = OTHER; note = guanosine-3'-phosphate
  modified_base 17: mod_base = OTHER; note = guanosine-3'-phosphate
  modified_base 18: mod_base = OTHER; note = adenosine-3'-phosphate
  modified_base 19: mod_base = OTHER; note = adenosine-3'-phosphate
  misc_feature 1..19: note = RNA
  misc_feature 20..21: note = DNA
aggcaacctgctacgggaatt

SEQ ID NO: 401 - DNA, 21 bp, synthetic construct
  source 1..21: mol_type = other DNA
  modified_base 1: mod_base = OTHER; note = uridine-3'-phosphate
  modified_base 2: mod_base = OTHER; note = adenosine-3'-phosphate
  modified_base 3: mod_base = OTHER; note = cytidine-3'-phosphate
  modified_base 4: mod_base = OTHER; note = guanosine-3'-phosphate
  modified_base 5: mod_base = OTHER; note = guanosine-3'-phosphate
  modified_base 6: mod_base = OTHER; note = guanosine-3'-phosphate
  modified_base 7: mod_base = OTHER; note = adenosine-3'-phosphate
  modified_base 8: mod_base = OTHER; note = adenosine-3'-phosphate
  modified_base 9: mod_base = OTHER; note = guanosine-3'-phosphate
  modified_base 10: mod_base = OTHER; note = adenosine-3'-phosphate
  modified_base 11: mod_base = OTHER; note = cytidine-3'-phosphate
  modified_base 12: mod_base = OTHER; note = cytidine-3'-phosphate
  modified_base 13: mod_base = OTHER; note = guanosine-3'-phosphate
  modified_base 14: mod_base = OTHER; note = guanosine-3'-phosphate
  modified_base 15: mod_base = OTHER; note = guanosine-3'-phosphate
  modified_base 16: mod_base = OTHER; note = guanosine-3'-phosphate
  modified_base 17: mod_base = OTHER; note = adenosine-3'-phosphate
  modified_base 18: mod_base = OTHER; note = cytidine-3'-phosphate
  modified_base 19: mod_base = OTHER; note = cytidine-3'-phosphate
  misc_feature 1..19: note = RNA
  misc_feature 20..21: note = DNA
tacgggaagaccggggacctt

SEQ ID NO: 402 - DNA, 21 bp, synthetic construct
  source 1..21: mol_type = other DNA
  modified_base 1: mod_base = OTHER; note = cytidine-3'-phosphate
  modified_base 2: mod_base = OTHER; note = guanosine-3'-phosphate
  modified_base 3: mod_base = OTHER; note = guanosine-3'-phosphate
  modified_base 4: mod_base = OTHER; note = guanosine-3'-phosphate
  modified_base 5: mod_base = OTHER; note = guanosine-3'-phosphate
  modified_base 6: mod_base = OTHER; note = adenosine-3'-phosphate
  modified_base 7: mod_base = OTHER; note = cytidine-3'-phosphate
  modified_base 8: mod_base = OTHER; note = cytidine-3'-phosphate
  modified_base 9: mod_base = OTHER; note = adenosine-3'-phosphate
  modified_base 10: mod_base = OTHER; note = adenosine-3'-phosphate
  modified_base 11: mod_base = OTHER; note = guanosine-3'-phosphate
  modified_base 12: mod_base = OTHER; note = adenosine-3'-phosphate
  modified_base 13: mod_base = OTHER; note = cytidine-3'-phosphate
  modified_base 14: mod_base = OTHER; note = cytidine-3'-phosphate
  modified_base 15: mod_base = OTHER; note = uridine-3'-phosphate
  modified_base 16: mod_base = OTHER; note = cytidine-3'-phosphate
  modified_base 17: mod_base = OTHER; note = uridine-3'-phosphate
  modified_base 18: mod_base = OTHER; note = guanosine-3'-phosphate
  modified_base 19: mod_base = OTHER; note = guanosine-3'-phosphate
  misc_feature 1..19: note = RNA
  misc_feature 20..21: note = DNA
cggggaccaagacctctggtt

SEQ ID NO: 403 - DNA, 21 bp, synthetic construct
  source 1..21: mol_type = other DNA
  modified_base 1: mod_base = OTHER; note = adenosine-3'-phosphate
  modified_base 2: mod_base = OTHER; note = guanosine-3'-phosphate
  modified_base 3: mod_base = OTHER; note = adenosine-3'-phosphate
  modified_base 4: mod_base = OTHER; note = cytidine-3'-phosphate
  modified_base 5: mod_base = OTHER; note = cytidine-3'-phosphate
  modified_base 6: mod_base = OTHER; note = uridine-3'-phosphate
  modified_base 7: mod_base = OTHER; note = cytidine-3'-phosphate
  modified_base 8: mod_base = OTHER; note = uridine-3'-phosphate
  modified_base 9: mod_base = OTHER; note = guanosine-3'-phosphate
  modified_base 10: mod_base = OTHER; note = guanosine-3'-phosphate
  modified_base 11: mod_base = OTHER; note = guanosine-3'-phosphate
  modified_base 12: mod_base = OTHER; note = uridine-3'-phosphate
  modified_base 13: mod_base = OTHER; note = uridine-3'-phosphate
  modified_base 14: mod_base = OTHER; note = guanosine-3'-phosphate
  modified_base 15: mod_base = OTHER; note = guanosine-3'-phosphate
  modified_base 16: mod_base = OTHER; note = cytidine-3'-phosphate
  modified_base 17: mod_base = OTHER; note = uridine-3'-phosphate
  modified_base 18: mod_base = OTHER; note = uridine-3'-phosphate
  modified_base 19: mod_base = OTHER; note = uridine-3'-phosphate
  misc_feature 1..19: note = RNA
  misc_feature 20..21: note = DNA
agacctctgggttggcttttt

SEQ ID NO: 404 - DNA, 21 bp, synthetic construct
  source 1..21: mol_type = other DNA
  modified_base 1: mod_base = OTHER; note = uridine-3'-phosphate
  modified_base 2: mod_base = OTHER; note = uridine-3'-phosphate
  modified_base 3: mod_base = OTHER; note = guanosine-3'-phosphate
  modified_base 4: mod_base = OTHER; note = guanosine-3'-phosphate
  modified_base 5: mod_base = OTHER; note = cytidine-3'-phosphate
  modified_base 6: mod_base = OTHER; note = uridine-3'-phosphate
  modified_base 7: mod_base = OTHER; note = uridine-3'-phosphate
  modified_base 8: mod_base = OTHER; note = uridine-3'-phosphate
  modified_base 9: mod_base = OTHER; note = cytidine-3'-phosphate
  modified_base 10: mod_base = OTHER; note = cytidine-3'-phosphate
  modified_base 11: mod_base = OTHER; note = uridine-3'-phosphate
  modified_base 12: mod_base = OTHER; note = adenosine-3'-phosphate
  modified_base 13: mod_base = OTHER; note = guanosine-3'-phosphate
  modified_base 14: mod_base = OTHER; note = adenosine-3'-phosphate
  modified_base 15: mod_base = OTHER; note = cytidine-3'-phosphate
  modified_base 16: mod_base = OTHER; note = cytidine-3'-phosphate
  modified_base 17: mod_base = OTHER; note = cytidine-3'-phosphate
  modified_base 18: mod_base = OTHER; note = guanosine-3'-phosphate
  modified_base 19: mod_base = OTHER; note = cytidine-3'-phosphate
  misc_feature 1..19: note = RNA
  misc_feature 20..21: note = DNA
ttggctttcctagacccgctt

SEQ ID NO: 405 - DNA, 21 bp, synthetic construct
  source 1..21: mol_type = other DNA
  modified_base 1: mod_base = OTHER; note = adenosine-3'-phosphate
  modified_base 2: mod_base = OTHER; note = guanosine-3'-phosphate
  modified_base 3: mod_base = OTHER; note = adenosine-3'-phosphate
  modified_base 4: mod_base = OTHER; note = cytidine-3'-phosphate
  modified_base 5: mod_base = OTHER; note = cytidine-3'-phosphate
  modified_base 6: mod_base = OTHER; note = cytidine-3'-phosphate
  modified_base 7: mod_base = OTHER; note = guanosine-3'-phosphate
  modified_base 8: mod_base = OTHER; note = cytidine-3'-phosphate
  modified_base 9: mod_base = OTHER; note = uridine-3'-phosphate
  modified_base 10: mod_base = OTHER; note = cytidine-3'-phosphate
  modified_base 11: mod_base = OTHER; note = guanosine-3'-phosphate
  modified_base 12: mod_base = OTHER; note = guanosine-3'-phosphate
  modified_base 13: mod_base = OTHER; note = guanosine-3'-phosphate
  modified_base 14: mod_base = OTHER; note = uridine-3'-phosphate
  modified_base 15: mod_base = OTHER; note = cytidine-3'-phosphate
  modified_base 16: mod_base = OTHER; note = uridine-3'-phosphate
  modified_base 17: mod_base = OTHER; note = uridine-3'-phosphate
  modified_base 18: mod_base = OTHER; note = cytidine-3'-phosphate
  modified_base 19: mod_base = OTHER; note = guanosine-3'-phosphate
  misc_feature 1..19: note = RNA
  misc_feature 20..21: note = DNA
agacccgctcgggtcttcgtt

SEQ ID NO: 406 - DNA, 21 bp, synthetic construct
  source 1..21: mol_type = other DNA
  modified_base 1: mod_base = OTHER; note = uridine-3'-phosphate
  modified_base 2: mod_base = OTHER; note = cytidine-3'-phosphate
  modified_base 3: mod_base = OTHER; note = uridine-3'-phosphate
  modified_base 4: mod_base = OTHER; note = uridine-3'-phosphate
  modified_base 5: mod_base = OTHER; note = cytidine-3'-phosphate
  modified_base 6: mod_base = OTHER; note = guanosine-3'-phosphate
  modified_base 7: mod_base = OTHER; note = guanosine-3'-phosphate
  modified_base 8: mod_base = OTHER; note = guanosine-3'-phosphate
  modified_base 9: mod_base = OTHER; note = uridine-3'-phosphate
  modified_base 10: mod_base = OTHER; note = guanosine-3'-phosphate
  modified_base 11: mod_base = OTHER; note = uridine-3'-phosphate
  modified_base 12: mod_base = OTHER; note = cytidine-3'-phosphate
  modified_base 13: mod_base = OTHER; note = guanosine-3'-phosphate
  modified_base 14: mod_base = OTHER; note = cytidine-3'-phosphate
  modified_base 15: mod_base = OTHER; note = guanosine-3'-phosphate
  modified_base 16: mod_base = OTHER; note = adenosine-3'-phosphate
  modified_base 17: mod_base = OTHER; note = guanosine-3'-phosphate
  modified_base 18: mod_base = OTHER; note = guanosine-3'-phosphate
  modified_base 19: mod_base = OTHER; note = adenosine-3'-phosphate
  misc_feature 1..19: note = RNA
  misc_feature 20..21: note = DNA
tcttcgggtgtcgcgaggatt

SEQ ID NO: 407 - DNA, 21 bp, synthetic construct
  source 1..21: mol_type = other DNA
  modified_base 1: mod_base = OTHER; note = cytidine-3'-phosphate
  modified_base 2: mod_base = OTHER; note = guanosine-3'-phosphate
  modified_base 3: mod_base = OTHER; note = cytidine-3'-phosphate
  modified_base 4: mod_base = OTHER; note = guanosine-3'-phosphate
  modified_base 5: mod_base = OTHER; note = adenosine-3'-phosphate
  modified_base 6: mod_base = OTHER; note = guanosine-3'-phosphate
  modified_base 7: mod_base = OTHER; note = guanosine-3'-phosphate
  modified_base 8: mod_base = OTHER; note = adenosine-3'-phosphate
  modified_base 9: mod_base = OTHER; note = adenosine-3'-phosphate
  modified_base 10: mod_base = OTHER; note = guanosine-3'-phosphate
  modified_base 11: mod_base = OTHER; note = guanosine-3'-phosphate
  modified_base 12: mod_base = OTHER; note = guanosine-3'-phosphate
  modified_base 13: mod_base = OTHER; note = cytidine-3'-phosphate
  modified_base 14: mod_base = OTHER; note = cytidine-3'-phosphate
  modified_base 15: mod_base = OTHER; note = cytidine-3'-phosphate
  modified_base 16: mod_base = OTHER; note = uridine-3'-phosphate
  modified_base 17: mod_base = OTHER; note = guanosine-3'-phosphate
  modified_base 18: mod_base = OTHER; note = cytidine-3'-phosphate
  modified_base 19: mod_base = OTHER; note = uridine-3'-phosphate
  misc_feature 1..19: note = RNA
  misc_feature 20..21: note = DNA
cgcgaggaagggccctgcttt

SEQ ID NO: 408 - DNA, 21 bp, synthetic construct
  source 1..21: mol_type = other DNA
  modified_base 1: mod_base = OTHER; note = guanosine-3'-phosphate
  modified_base 2: mod_base = OTHER; note = guanosine-3'-phosphate
  modified_base 3: mod_base = OTHER; note = guanosine-3'-phosphate
  modified_base 4: mod_base = OTHER; note = cytidine-3'-phosphate
  modified_base 5: mod_base = OTHER; note = cytidine-3'-phosphate
  modified_base 6: mod_base = OTHER; note = cytidine-3'-phosphate
  modified_base 7: mod_base = OTHER; note = uridine-3'-phosphate
  modified_base 8: mod_base = OTHER; note = guanosine-3'-phosphate
  modified_base 9: mod_base = OTHER; note = cytidine-3'-phosphate
  modified_base 10: mod_base = OTHER; note = uridine-3'-phosphate
  modified_base 11: mod_base = OTHER; note = cytidine-3'-phosphate
  modified_base 12: mod_base = OTHER; note = cytidine-3'-phosphate
  modified_base 13: mod_base = OTHER; note = uridine-3'-phosphate
  modified_base 14: mod_base = OTHER; note = uridine-3'-phosphate
  modified_base 15: mod_base = OTHER; note = uridine-3'-phosphate
  modified_base 16: mod_base = OTHER; note = cytidine-3'-phosphate
  modified_base 17: mod_base = OTHER; note = guanosine-3'-phosphate
  modified_base 18: mod_base = OTHER; note = uridine-3'-phosphate
  modified_base 19: mod_base = OTHER; note = uridine-3'-phosphate
  misc_feature 1..19: note = RNA
  misc_feature 20..21: note = DNA
gggccctgctcctttcgtttt

SEQ ID NO: 409 - DNA, 21 bp, synthetic construct
  source 1..21: mol_type = other DNA
  modified_base 1: mod_base = OTHER; note = uridine-3'-phosphate
  modified_base 2: mod_base = OTHER; note = guanosine-3'-phosphate
  modified_base 3: mod_base = OTHER; note = cytidine-3'-phosphate
  modified_base 4: mod_base = OTHER; note = adenosine-3'-phosphate
  modified_base 5: mod_base = OTHER; note = cytidine-3'-phosphate
  modified_base 6: mod_base = OTHER; note = cytidine-3'-phosphate
  modified_base 7: mod_base = OTHER; note = cytidine-3'-phosphate
  modified_base 8: mod_base = OTHER; note = cytidine-3'-phosphate
  modified_base 9: mod_base = OTHER; note = uridine-3'-phosphate
  modified_base 10: mod_base = OTHER; note = guanosine-3'-phosphate
  modified_base 11: mod_base = OTHER; note = guanosine-3'-phosphate
  modified_base 12: mod_base = OTHER; note = cytidine-3'-phosphate
  modified_base 13: mod_base = OTHER; note = cytidine-3'-phosphate
  modified_base 14: mod_base = OTHER; note = guanosine-3'-phosphate
  modified_base 15: mod_base = OTHER; note = cytidine-3'-phosphate
  modified_base 16: mod_base = OTHER; note = uridine-3'-phosphate
  modified_base 17: mod_base = OTHER; note = guanosine-3'-phosphate
  modified_base 18: mod_base = OTHER; note = cytidine-3'-phosphate
  modified_base 19: mod_base = OTHER; note = adenosine-3'-phosphate
  misc_feature 1..19: note = RNA
  misc_feature 20..21: note = DNA
tgcacccctggccgctgcatt

SEQ ID NO: 410 - DNA, 21 bp, synthetic construct
  source 1..21: mol_type = other DNA
  modified_base 1: mod_base = OTHER; note = cytidine-3'-phosphate
  modified_base 2: mod_base = OTHER; note = cytidine-3'-phosphate
  modified_base 3: mod_base = OTHER; note = guanosine-3'-phosphate
  modified_base 4: mod_base = OTHER; note = cytidine-3'-phosphate
  modified_base 5: mod_base = OTHER; note = uridine-3'-phosphate
  modified_base 6: mod_base = OTHER; note = guanosine-3'-phosphate
  modified_base 7: mod_base = OTHER; note = cytidine-3'-phosphate
  modified_base 8: mod_base = OTHER; note = adenosine-3'-phosphate
  modified_base 9: mod_base = OTHER; note = guanosine-3'-phosphate
  modified_base 10: mod_base = OTHER; note = guanosine-3'-phosphate
  modified_base 11: mod_base = OTHER; note = uridine-3'-phosphate
  modified_base 12: mod_base = OTHER; note = guanosine-3'-phosphate
  modified_base 13: mod_base = OTHER; note = guanosine-3'-phosphate
  modified_base 14: mod_base = OTHER; note = cytidine-3'-phosphate
  modified_base 15: mod_base = OTHER; note = uridine-3'-phosphate
  modified_base 16: mod_base = OTHER; note = cytidine-3'-phosphate
  modified_base 17: mod_base = OTHER; note = cytidine-3'-phosphate
  modified_base 18: mod_base = OTHER; note = cytidine-3'-phosphate
  modified_base 19: mod_base = OTHER; note = uridine-3'-phosphate
  misc_feature 1..19: note = RNA
  misc_feature 20..21: note = DNA
ccgctgcaggtggctcccttt

SEQ ID NO: 411 - DNA, 21 bp, synthetic construct
  source 1..21: mol_type = other DNA
  modified_base 1: mod_base = OTHER; note = guanosine-3'-phosphate
  modified_base 2: mod_base = OTHER; note = cytidine-3'-phosphate
  modified_base 3: mod_base = OTHER; note = uridine-3'-phosphate
  modified_base 4: mod_base = OTHER; note = cytidine-3'-phosphate
  modified_base 5: mod_base = OTHER; note = cytidine-3'-phosphate
  modified_base 6: mod_base = OTHER; note = cytidine-3'-phosphate
  modified_base 7: mod_base = OTHER; note = uridine-3'-phosphate
  modified_base 8: mod_base = OTHER; note = guanosine-3'-phosphate
  modified_base 9: mod_base = OTHER; note = guanosine-3'-phosphate
  modified_base 10: mod_base = OTHER; note = adenosine-3'-phosphate
  modified_base 11: mod_base = OTHER; note = guanosine-3'-phosphate
  modified_base 12: mod_base = OTHER; note = guanosine-3'-phosphate
  modified_base 13: mod_base = OTHER; note = adenosine-3'-phosphate
  modified_base 14: mod_base = OTHER; note = guanosine-3'-phosphate
  modified_base 15: mod_base = OTHER; note = guanosine-3'-phosphate
  modified_base 16: mod_base = OTHER; note = adenosine-3'-phosphate
  modified_base 17: mod_base = OTHER; note = guanosine-3'-phosphate
  modified_base 18: mod_base = OTHER; note = cytidine-3'-phosphate
  modified_base 19: mod_base = OTHER; note = uridine-3'-phosphate
  misc_feature 1..19: note = RNA
  misc_feature 20..21: note = DNA
gctccctggaggaggagcttt

SEQ ID NO: 412 - DNA, 21 bp, synthetic construct
  source 1..21: mol_type = other DNA
  modified_base 1: mod_base = OTHER; note = adenosine-3'-phosphate
  modified_base 2: mod_base = OTHER; note = guanosine-3'-phosphate
  modified_base 3: mod_base = OTHER; note = guanosine-3'-phosphate
  modified_base 4: mod_base = OTHER; note = adenosine-3'-phosphate
  modified_base 5: mod_base = OTHER; note = guanosine-3'-phosphate
  modified_base 6: mod_base = OTHER; note = cytidine-3'-phosphate
  modified_base 7: mod_base = OTHER; note = uridine-3'-phosphate
  modified_base 8: mod_base = OTHER; note = cytidine-3'-phosphate
  modified_base 9: mod_base = OTHER; note = cytidine-3'-phosphate
  modified_base 10: mod_base = OTHER; note = cytidine-3'-phosphate
  modified_base 11: mod_base = OTHER; note = adenosine-3'-phosphate
  modified_base 12: mod_base = OTHER; note = cytidine-3'-phosphate
  modified_base 13: mod_base = OTHER; note = guanosine-3'-phosphate
  modified_base 14: mod_base = OTHER; note = cytidine-3'-phosphate
  modified_base 15: mod_base = OTHER; note = guanosine-3'-phosphate
  modified_base 16: mod_base = OTHER; note = guanosine-3'-phosphate
  modified_base 17: mod_base = OTHER; note = adenosine-3'-phosphate
  modified_base 18: mod_base = OTHER; note = guanosine-3'-phosphate
  modified_base 19: mod_base = OTHER; note = guanosine-3'-phosphate
  misc_feature 1..19: note = RNA
  misc_feature 20..21: note = DNA
aggagctcccacgcggaggtt

SEQ ID NO: 413 - DNA, 21 bp, synthetic construct
  source 1..21: mol_type = other DNA
  modified_base 1: mod_base = OTHER; note = adenosine-3'-phosphate
  modified_base 2: mod_base = OTHER; note = cytidine-3'-phosphate
  modified_base 3: mod_base = OTHER; note = guanosine-3'-phosphate
  modified_base 4: mod_base = OTHER; note = cytidine-3'-phosphate
  modified_base 5: mod_base = OTHER; note = guanosine-3'-phosphate
  modified_base 6: mod_base = OTHER; note = guanosine-3'-phosphate
  modified_base 7: mod_base = OTHER; note = adenosine-3'-phosphate
  modified_base 8: mod_base = OTHER; note = guanosine-3'-phosphate
  modified_base 9: mod_base = OTHER; note = guanosine-3'-phosphate
  modified_base 10: mod_base = OTHER; note = adenosine-3'-phosphate
  modified_base 11: mod_base = OTHER; note = guanosine-3'-phosphate
  modified_base 12: mod_base = OTHER; note = guanosine-3'-phosphate
  modified_base 13: mod_base = OTHER; note = adenosine-3'-phosphate
  modified_base 14: mod_base = OTHER; note = guanosine-3'-phosphate
  modified_base 15: mod_base = OTHER; note = cytidine-3'-phosphate
  modified_base 16: mod_base = OTHER; note = cytidine-3'-phosphate
  modified_base 17: mod_base = OTHER; note = adenosine-3'-phosphate
  modified_base 18: mod_base = OTHER; note = guanosine-3'-phosphate
  modified_base 19: mod_base = OTHER; note = guanosine-3'-phosphate
  misc_feature 1..19: note = RNA
  misc_feature 20..21: note = DNA
acgcggaggaggagccaggtt

SEQ ID NO: 414 - DNA, 21 bp, synthetic construct
  source 1..21: mol_type = other DNA
  modified_base 1: mod_base = OTHER; note = adenosine-3'-phosphate
  modified_base 2: mod_base = OTHER; note = guanosine-3'-phosphate
  modified_base 3: mod_base = OTHER; note = cytidine-3'-phosphate
  modified_base 4: mod_base = OTHER; note = cytidine-3'-phosphate
  modified_base 5: mod_base = OTHER; note = adenosine-3'-phosphate
  modified_base 6: mod_base = OTHER; note = guanosine-3'-phosphate
  modified_base 7: mod_base = OTHER; note = guanosine-3'-phosphate
  modified_base 8: mod_base = OTHER; note = guanosine-3'-phosphate
  modified_base 9: mod_base = OTHER; note = cytidine-3'-phosphate
  modified_base 10: mod_base = OTHER; note = adenosine-3'-phosphate
  modified_base 11: mod_base = OTHER; note = guanosine-3'-phosphate
  modified_base 12: mod_base = OTHER; note = cytidine-3'-phosphate
  modified_base 13: mod_base = OTHER; note = uridine-3'-phosphate
  modified_base 14: mod_base = OTHER; note = guanosine-3'-phosphate
  modified_base 15: mod_base = OTHER; note = guanosine-3'-phosphate
  modified_base 16: mod_base = OTHER; note = guanosine-3'-phosphate
  modified_base 17: mod_base = OTHER; note = adenosine-3'-phosphate
  modified_base 18: mod_base = OTHER; note = guanosine-3'-phosphate
  modified_base 19: mod_base = OTHER; note = cytidine-3'-phosphate
  misc_feature 1..19: note = RNA
  misc_feature 20..21: note = DNA
agccagggcagctgggagctt

SEQ ID NO: 415 - DNA, 21 bp, synthetic construct
  source 1..21: mol_type = other DNA
  modified_base 1: mod_base = OTHER; note = cytidine-3'-phosphate
  modified_base 2: mod_base = OTHER; note = uridine-3'-phosphate
  modified_base 3: mod_base = OTHER; note = guanosine-3'-phosphate
  modified_base 4: mod_base = OTHER; note = guanosine-3'-phosphate
  modified_base 5: mod_base = OTHER; note = guanosine-3'-phosphate
  modified_base 6: mod_base = OTHER; note = adenosine-3'-phosphate
  modified_base 7: mod_base = OTHER; note = guanosine-3'-phosphate
  modified_base 8: mod_base = OTHER; note = cytidine-3'-phosphate
  modified_base 9: mod_base = OTHER; note = guanosine-3'-phosphate
  modified_base 10: mod_base = OTHER; note = guanosine-3'-phosphate
  modified_base 11: mod_base = OTHER; note = guanosine-3'-phosphate
  modified_base 12: mod_base = OTHER; note = guanosine-3'-phosphate
  modified_base 13: mod_base = OTHER; note = adenosine-3'-phosphate
  modified_base 14: mod_base = OTHER; note = cytidine-3'-phosphate
  modified_base 15: mod_base = OTHER; note = adenosine-3'-phosphate
  modified_base 16: mod_base = OTHER; note = cytidine-3'-phosphate
  modified_base 17: mod_base = OTHER; note = cytidine-3'-phosphate
  modified_base 18: mod_base = OTHER; note = adenosine-3'-phosphate
  modified_base 19: mod_base = OTHER; note = uridine-3'-phosphate
  misc_feature 1..19: note = RNA
  misc_feature 20..21: note = DNA
ctgggagcggggacaccattt

SEQ ID NO: 416 - DNA, 21 bp, synthetic construct
  source 1..21: mol_type = other DNA
  modified_base 1: mod_base = OTHER; note = guanosine-3'-phosphate
  modified_base 2: mod_base = OTHER; note = guanosine-3'-phosphate
  modified_base 3: mod_base = OTHER; note = adenosine-3'-phosphate
  modified_base 4: mod_base = OTHER; note = cytidine-3'-phosphate
  modified_base 5: mod_base = OTHER; note = adenosine-3'-phosphate
  modified_base 6: mod_base = OTHER; note = cytidine-3'-phosphate
  modified_base 7: mod_base = OTHER; note = cytidine-3'-phosphate
  modified_base 8: mod_base = OTHER; note = adenosine-3'-phosphate
  modified_base 9: mod_base = OTHER; note = uridine-3'-phosphate
  modified_base 10: mod_base = OTHER; note = cytidine-3'-phosphate
  modified_base 11: mod_base = OTHER; note = cytidine-3'-phosphate
  modified_base 12: mod_base = OTHER; note = uridine-3'-phosphate
  modified_base 13: mod_base = OTHER; note = cytidine-3'-phosphate
  modified_base 14: mod_base = OTHER; note = cytidine-3'-phosphate
  modified_base 15: mod_base = OTHER; note = uridine-3'-phosphate
  modified_base 16: mod_base = OTHER; note = guanosine-3'-phosphate
  modified_base 17: mod_base = OTHER; note = guanosine-3'-phosphate
  modified_base 18: mod_base = OTHER; note = adenosine-3'-phosphate
  modified_base 19: mod_base = OTHER; note = uridine-3'-phosphate
  misc_feature 1..19: note = RNA
  misc_feature 20..21: note = DNA
ggacaccatcctcctggattt

SEQ ID NO: 417 - DNA, 21 bp, synthetic construct
  source 1..21: mol_type = other DNA
  modified_base 1: mod_base = OTHER; note = cytidine-3'-phosphate
  modified_base 2: mod_base = OTHER; note = cytidine-3'-phosphate
  modified_base 3: mod_base = OTHER; note = uridine-3'-phosphate
  modified_base 4: mod_base = OTHER; note = guanosine-3'-phosphate
  modified_base 5: mod_base = OTHER; note = guanosine-3'-phosphate
  modified_base 6: mod_base = OTHER; note = adenosine-3'-phosphate
  modified_base 7: mod_base = OTHER; note = uridine-3'-phosphate
  modified_base 8: mod_base = OTHER; note = adenosine-3'-phosphate
  modified_base 9: mod_base = OTHER; note = adenosine-3'-phosphate
  modified_base 10: mod_base = OTHER; note = guanosine-3'-phosphate
  modified_base 11: mod_base = OTHER; note = adenosine-3'-phosphate
  modified_base 12: mod_base = OTHER; note = guanosine-3'-phosphate
  modified_base 13: mod_base = OTHER; note = guanosine-3'-phosphate
  modified_base 14: mod_base = OTHER; note = cytidine-3'-phosphate
  modified_base 15: mod_base = OTHER; note = adenosine-3'-phosphate
  modified_base 16: mod_base = OTHER; note = guanosine-3'-phosphate
  modified_base 17: mod_base = OTHER; note = adenosine-3'-phosphate
  modified_base 18: mod_base = OTHER; note = guanosine-3'-phosphate
  modified_base 19: mod_base = OTHER; note = guanosine-3'-phosphate
  misc_feature 1..19: note = RNA
  misc_feature 20..21: note = DNA
cctggataagaggcagaggtt

SEQ ID NO: 418 - DNA, 21 bp, synthetic construct
  source 1..21: mol_type = other DNA
  modified_base 1: mod_base = OTHER; note = adenosine-3'-phosphate
  modified_base 2: mod_base = OTHER; note = guanosine-3'-phosphate
  modified_base 3: mod_base = OTHER; note = guanosine-3'-phosphate
  modified_base 4: mod_base = OTHER; note = cytidine-3'-phosphate
  modified_base 5: mod_base = OTHER; note = adenosine-3'-phosphate
  modified_base 6: mod_base = OTHER; note = guanosine-3'-phosphate
  modified_base 7: mod_base = OTHER; note = adenosine-3'-phosphate
  modified_base 8: mod_base = OTHER; note = guanosine-3'-phosphate
  modified_base 9: mod_base = OTHER; note = guanosine-3'-phosphate
  modified_base 10: mod_base = OTHER; note = cytidine-3'-phosphate
  modified_base 11: mod_base = OTHER; note = cytidine-3'-phosphate
  modified_base 12: mod_base = OTHER; note = guanosine-3'-phosphate
  modified_base 13: mod_base = OTHER; note = guanosine-3'-phosphate
  modified_base 14: mod_base = OTHER; note = guanosine-3'-phosphate
  modified_base 15: mod_base = OTHER; note = adenosine-3'-phosphate
  modified_base 16: mod_base = OTHER; note = guanosine-3'-phosphate
  modified_base 17: mod_base = OTHER; note = guanosine-3'-phosphate
  modified_base 18: mod_base = OTHER; note = adenosine-3'-phosphate
  modified_base 19: mod_base = OTHER; note = adenosine-3'-phosphate
  misc_feature 1..19: note = RNA
  misc_feature 20..21: note = DNA
aggcagaggccgggaggaatt

SEQ ID NO: 419 - DNA, 21 bp, synthetic construct
  source 1..21: mol_type = other DNA
  modified_base 1: mod_base = OTHER; note = guanosine-3'-phosphate
  modified_base 2: mod_base = OTHER; note = guanosine-3'-phosphate
  modified_base 3: mod_base = OTHER; note = adenosine-3'-phosphate
  modified_base 4: mod_base = OTHER; note = guanosine-3'-phosphate
  modified_base 5: mod_base = OTHER; note = guanosine-3'-phosphate
  modified_base 6: mod_base = OTHER; note = adenosine-3'-phosphate
  modified_base 7: mod_base = OTHER; note = adenosine-3'-phosphate
  modified_base 8: mod_base = OTHER; note = cytidine-3'-phosphate
  modified_base 9: mod_base = OTHER; note = cytidine-3'-phosphate
  modified_base 10: mod_base = OTHER; note = cytidine-3'-phosphate
  modified_base 11: mod_base = OTHER; note = cytidine-3'-phosphate
  modified_base 12: mod_base = OTHER; note = guanosine-3'-phosphate
  modified_base 13: mod_base = OTHER; note = uridine-3'-phosphate
  modified_base 14: mod_base = OTHER; note = cytidine-3'-phosphate
  modified_base 15: mod_base = OTHER; note = adenosine-3'-phosphate
  modified_base 16: mod_base = OTHER; note = guanosine-3'-phosphate
  modified_base 17: mod_base = OTHER; note = cytidine-3'-phosphate
  modified_base 18: mod_base = OTHER; note = cytidine-3'-phosphate
  modified_base 19: mod_base = OTHER; note = guanosine-3'-phosphate
  misc_feature 1..19: note = RNA
  misc_feature 20..21: note = DNA
ggaggaaccccgtcagccgtt

SEQ ID NO: 420 - DNA, 21 bp, synthetic construct
  source 1..21: mol_type = other DNA
  modified_base 1: mod_base = OTHER; note = cytidine-3'-phosphate
  modified_base 2: mod_base = OTHER; note = guanosine-3'-phosphate
  modified_base 3: mod_base = OTHER; note = uridine-3'-phosphate
  modified_base 4: mod_base = OTHER; note = cytidine-3'-phosphate
  modified_base 5: mod_base = OTHER; note = adenosine-3'-phosphate
  modified_base 6: mod_base = OTHER; note = guanosine-3'-phosphate
  modified_base 7: mod_base = OTHER; note = cytidine-3'-phosphate
  modified_base 8: mod_base = OTHER; note = cytidine-3'-phosphate
  modified_base 9: mod_base = OTHER; note = guanosine-3'-phosphate
  modified_base 10: mod_base = OTHER; note = guanosine-3'-phosphate
  modified_base 11: mod_base = OTHER; note = guanosine-3'-phosphate
  modified_base 12: mod_base = OTHER; note = cytidine-3'-phosphate
  modified_base 13: mod_base = OTHER; note = guanosine-3'-phosphate
  modified_base 14: mod_base = OTHER; note = guanosine-3'-phosphate
  modified_base 15: mod_base = OTHER; note = guanosine-3'-phosphate
  modified_base 16: mod_base = OTHER; note = cytidine-3'-phosphate
  modified_base 17: mod_base = OTHER; note = adenosine-3'-phosphate
  modified_base 18: mod_base = OTHER; note = guanosine-3'-phosphate
  modified_base 19: mod_base = OTHER; note = guanosine-3'-phosphate
  misc_feature 1..19: note = RNA
  misc_feature 20..21: note = DNA
cgtcagccgggcgggcaggtt

SEQ ID NO: 421 - DNA, 21 bp, synthetic construct
  source 1..21: mol_type = other DNA
  modified_base 1: mod_base = OTHER; note = cytidine-3'-phosphate
  modified_base 2: mod_base = OTHER; note = guanosine-3'-phosphate
  modified_base 3: mod_base = OTHER; note = guanosine-3'-phosphate
  modified_base 4: mod_base = OTHER; note = guanosine-3'-phosphate
  modified_base 5: mod_base = OTHER; note = cytidine-3'-phosphate
  modified_base 6: mod_base = OTHER; note = adenosine-3'-phosphate
  modified_base 7: mod_base = OTHER; note = guanosine-3'-phosphate
  modified_base 8: mod_base = OTHER; note = guanosine-3'-phosphate
  modified_base 9: mod_base = OTHER; note = adenosine-3'-phosphate
  modified_base 10: mod_base = OTHER; note = adenosine-3'-phosphate
  modified_base 11: mod_base = OTHER; note = guanosine-3'-phosphate
  modified_base 12: mod_base = OTHER; note = cytidine-3'-phosphate
  modified_base 13: mod_base = OTHER; note = uridine-3'-phosphate
  modified_base 14: mod_base = OTHER; note = cytidine-3'-phosphate
  modified_base 15: mod_base = OTHER; note = uridine-3'-phosphate
  modified_base 16: mod_base = OTHER; note = guanosine-3'-phosphate
  modified_base 17: mod_base = OTHER; note = guanosine-3'-phosphate
  modified_base 18: mod_base = OTHER; note = guanosine-3'-phosphate
  modified_base 19: mod_base = OTHER; note = adenosine-3'-phosphate
  misc_feature 1..19: note = RNA
  misc_feature 20..21: note = DNA
cgggcaggaagctctgggatt

SEQ ID NO: 422 - DNA, 21 bp, synthetic construct
  source 1..21: mol_type = other DNA
  modified_base 1: mod_base = OTHER; note = uridine-3'-phosphate
  modified_base 2: mod_base = OTHER; note = cytidine-3'-phosphate
  modified_base 3: mod_base = OTHER; note = uridine-3'-phosphate
  modified_base 4: mod_base = OTHER; note = guanosine-3'-phosphate
  modified_base 5: mod_base = OTHER; note = guanosine-3'-phosphate
  modified_base 6: mod_base = OTHER; note = guanosine-3'-phosphate
  modified_base 7: mod_base = OTHER; note = adenosine-3'-phosphate
  modified_base 8: mod_base = OTHER; note = guanosine-3'-phosphate
  modified_base 9: mod_base = OTHER; note = uridine-3'-phosphate
  modified_base 10: mod_base = OTHER; note = adenosine-3'-phosphate
  modified_base 11: mod_base = OTHER; note = guanosine-3'-phosphate
  modified_base 12: mod_base = OTHER; note = cytidine-3'-phosphate
  modified_base 13: mod_base = OTHER; note = cytidine-3'-phosphate
  modified_base 14: mod_base = OTHER; note = uridine-3'-phosphate
  modified_base 15: mod_base = OTHER; note = cytidine-3'-phosphate
  modified_base 16: mod_base = OTHER; note = adenosine-3'-phosphate
  modified_base 17: mod_base = OTHER; note = uridine-3'-phosphate
  modified_base 18: mod_base = OTHER; note = guanosine-3'-phosphate
  modified_base 19: mod_base = OTHER; note = guanosine-3'-phosphate
  misc_feature 1..19: note = RNA
  misc_feature 20..21: note = DNA
tctgggagtagcctcatggtt

SEQ ID NO: 423 - DNA, 21 bp, synthetic construct
  source 1..21: mol_type = other DNA
  modified_base 1: mod_base = OTHER; note = adenosine-3'-phosphate
  modified_base 2: mod_base = OTHER; note = guanosine-3'-phosphate
  modified_base 3: mod_base = OTHER; note = cytidine-3'-phosphate
  modified_base 4: mod_base = OTHER; note = cytidine-3'-phosphate
  modified_base 5: mod_base = OTHER; note = uridine-3'-phosphate
  modified_base 6: mod_base = OTHER; note = cytidine-3'-phosphate
  modified_base 7: mod_base = OTHER; note = adenosine-3'-phosphate
  modified_base 8: mod_base = OTHER; note = uridine-3'-phosphate
  modified_base 9: mod_base = OTHER; note = guanosine-3'-phosphate
  modified_base 10: mod_base = OTHER; note = guanosine-3'-phosphate
  modified_base 11: mod_base = OTHER; note = adenosine-3'-phosphate
  modified_base 12: mod_base = OTHER; note = adenosine-3'-phosphate
  modified_base 13: mod_base = OTHER; note = guanosine-3'-phosphate
  modified_base 14: mod_base = OTHER; note = adenosine-3'-phosphate
  modified_base 15: mod_base = OTHER; note = guanosine-3'-phosphate
  modified_base 16: mod_base = OTHER; note = adenosine-3'-phosphate
  modified_base 17: mod_base = OTHER; note = adenosine-3'-phosphate
  modified_base 18: mod_base = OTHER; note = guanosine-3'-phosphate
  modified_base 19: mod_base = OTHER; note = cytidine-3'-phosphate
  misc_feature 1..19: note = RNA
  misc_feature 20..21: note = DNA
agcctcatggaagagaagctt

SEQ ID NO: 424 - DNA, 21 bp, synthetic construct
  source 1..21: mol_type = other DNA
  modified_base 1: mod_base = OTHER; note = adenosine-3'-phosphate
  modified_base 2: mod_base = OTHER; note = guanosine-3'-phosphate
  modified_base 3: mod_base = OTHER; note = adenosine-3'-phosphate
  modified_base 4: mod_base = OTHER; note = adenosine-3'-phosphate
  modified_base 5: mod_base = OTHER; note = guanosine-3'-phosphate
  modified_base 6: mod_base = OTHER; note = cytidine-3'-phosphate
  modified_base 7: mod_base = OTHER; note = adenosine-3'-phosphate
  modified_base 8: mod_base = OTHER; note = guanosine-3'-phosphate
  modified_base 9: mod_base = OTHER; note = adenosine-3'-phosphate
  modified_base 10: mod_base = OTHER; note = uridine-3'-phosphate
  modified_base 11: mod_base = OTHER; note = cytidine-3'-phosphate
  modified_base 12: mod_base = OTHER; note = cytidine-3'-phosphate
  modified_base 13: mod_base = OTHER; note = uridine-3'-phosphate
  modified_base 14: mod_base = OTHER; note = guanosine-3'-phosphate
  modified_base 15: mod_base = OTHER; note = uridine-3'-phosphate
  modified_base 16: mod_base = OTHER; note = guanosine-3'-phosphate
  modified_base 17: mod_base = OTHER; note = cytidine-3'-phosphate
  modified_base 18: mod_base = OTHER; note = guanosine-3'-phosphate
  modified_base 19: mod_base = OTHER; note = uridine-3'-phosphate
  misc_feature 1..19: note = RNA
  misc_feature 20..21: note = DNA
agaagcagatcctgtgcgttt

SEQ ID NO: 425 - DNA, 21 bp, synthetic construct
  source 1..21: mol_type = other DNA
  modified_base 1: mod_base = OTHER; note = cytidine-3'-phosphate
  modified_base 2: mod_base = OTHER; note = uridine-3'-phosphate
  modified_base 3: mod_base = OTHER; note = guanosine-3'-phosphate
  modified_base 4: mod_base = OTHER; note = uridine-3'-phosphate
  modified_base 5: mod_base = OTHER; note = guanosine-3'-phosphate
  modified_base 6: mod_base = OTHER; note = cytidine-3'-phosphate
  modified_base 7: mod_base = OTHER; note = guanosine-3'-phosphate
  modified_base 8: mod_base = OTHER; note = uridine-3'-phosphate
  modified_base 9: mod_base = OTHER; note = guanosine-3'-phosphate
  modified_base 10: mod_base = OTHER; note = guanosine-3'-phosphate
  modified_base 11: mod_base = OTHER; note = guanosine-3'-phosphate
  modified_base 12: mod_base = OTHER; note = guanosine-3'-phosphate
  modified_base 13: mod_base = OTHER; note = cytidine-3'-phosphate
  modified_base 14: mod_base = OTHER; note = uridine-3'-phosphate
  modified_base 15: mod_base = OTHER; note = adenosine-3'-phosphate
  modified_base 16: mod_base = OTHER; note = guanosine-3'-phosphate
  modified_base 17: mod_base = OTHER; note = uridine-3'-phosphate
  modified_base 18: mod_base = OTHER; note = guanosine-3'-phosphate
  modified_base 19: mod_base = OTHER; note = guanosine-3'-phosphate
  misc_feature 1..19: note = RNA
  misc_feature 20..21: note = DNA
ctgtgcgtggggctagtggtt

SEQ ID NO: 426 - DNA, 21 bp, synthetic construct
  source 1..21: mol_type = other DNA
  modified_base 1: mod_base = OTHER; note = guanosine-3'-phosphate
  modified_base 2: mod_base = OTHER; note = guanosine-3'-phosphate
  modified_base 3: mod_base = OTHER; note = cytidine-3'-phosphate
  modified_base 4: mod_base = OTHER; note = uridine-3'-phosphate
  modified_base 5: mod_base = OTHER; note = adenosine-3'-phosphate
  modified_base 6: mod_base = OTHER; note = guanosine-3'-phosphate
  modified_base 7: mod_base = OTHER; note = uridine-3'-phosphate
  modified_base 8: mod_base = OTHER; note = guanosine-3'-phosphate
  modified_base 9: mod_base = OTHER; note = guanosine-3'-phosphate
  modified_base 10: mod_base = OTHER; note = uridine-3'-phosphate
  modified_base 11: mod_base = OTHER; note = guanosine-3'-phosphate
  modified_base 12: mod_base = OTHER; note = cytidine-3'-phosphate
  modified_base 13: mod_base = OTHER; note = uridine-3'-phosphate
  modified_base 14: mod_base = OTHER; note = guanosine-3'-phosphate
  modified_base 15: mod_base = OTHER; note = guanosine-3'-phosphate
  modified_base 16: mod_base = OTHER; note = adenosine-3'-phosphate
  modified_base 17: mod_base = OTHER; note = cytidine-3'-phosphate
  modified_base 18: mod_base = OTHER; note = guanosine-3'-phosphate
  modified_base 19: mod_base = OTHER; note = uridine-3'-phosphate
  misc_feature 1..19: note = RNA
  misc_feature 20..21: note = DNA
ggctagtggtgctggacgttt

SEQ ID NO: 427 - DNA, 21 bp, synthetic construct
  source 1..21: mol_type = other DNA
  modified_base 1: mod_base = OTHER; note = uridine-3'-phosphate
  modified_base 2: mod_base = OTHER; note = guanosine-3'-phosphate
  modified_base 3: mod_base = OTHER; note = guanosine-3'-phosphate
  modified_base 4: mod_base = OTHER; note = adenosine-3'-phosphate
  modified_base 5: mod_base = OTHER; note = cytidine-3'-phosphate
  modified_base 6: mod_base = OTHER; note = guanosine-3'-phosphate
  modified_base 7: mod_base = OTHER; note = uridine-3'-phosphate
  modified_base 8: mod_base = OTHER; note = cytidine-3'-phosphate
  modified_base 9: mod_base = OTHER; note = adenosine-3'-phosphate
  modified_base 10: mod_base = OTHER; note = uridine-3'-phosphate
  modified_base 11: mod_base = OTHER; note = cytidine-3'-phosphate
  modified_base 12: mod_base = OTHER; note = adenosine-3'-phosphate
  modified_base 13: mod_base = OTHER; note = guanosine-3'-phosphate
  modified_base 14: mod_base = OTHER; note = cytidine-3'-phosphate
  modified_base 15: mod_base = OTHER; note = cytidine-3'-phosphate
  modified_base 16: mod_base = OTHER; note = uridine-3'-phosphate
  modified_base 17: mod_base = OTHER; note = guanosine-3'-phosphate
  modified_base 18: mod_base = OTHER; note = guanosine-3'-phosphate
  modified_base 19: mod_base = OTHER; note = uridine-3'-phosphate
  misc_feature 1..19: note = RNA
  misc_feature 20..21: note = DNA
tggacgtcatcagcctggttt

SEQ ID NO: 428 - DNA, 21 bp, synthetic construct
  source 1..21: mol_type = other DNA
  modified_base 1: mod_base = OTHER; note = adenosine-3'-phosphate
  modified_base 2: mod_base = OTHER; note = guanosine-3'-phosphate
  modified_base 3: mod_base = OTHER; note = cytidine-3'-phosphate
  modified_base 4: mod_base = OTHER; note = cytidine-3'-phosphate
  modified_base 5: mod_base = OTHER; note = uridine-3'-phosphate
  modified_base 6: mod_base = OTHER; note = guanosine-3'-phosphate
  modified_base 7: mod_base = OTHER; note = guanosine-3'-phosphate
  modified_base 8: mod_base = OTHER; note = uridine-3'-phosphate
  modified_base 9: mod_base = OTHER; note = guanosine-3'-phosphate
  modified_base 10: mod_base = OTHER; note = guanosine-3'-phosphate
  modified_base 11: mod_base = OTHER; note = adenosine-3'-phosphate
  modified_base 12: mod_base = OTHER; note = cytidine-3'-phosphate
  modified_base 13: mod_base = OTHER; note = adenosine-3'-phosphate
  modified_base 14: mod_base = OTHER; note = adenosine-3'-phosphate
  modified_base 15: mod_base = OTHER; note = guanosine-3'-phosphate
  modified_base 16: mod_base = OTHER; note = uridine-3'-phosphate
  modified_base 17: mod_base = OTHER; note = adenosine-3'-phosphate
  modified_base 18: mod_base = OTHER; note = cytidine-3'-phosphate
  modified_base 19: mod_base = OTHER; note = cytidine-3'-phosphate
  misc_feature 1..19: note = RNA
  misc_feature 20..21: note = DNA
agcctggtggacaagtacctt

SEQ ID NO: 429 - DNA, 21 bp, synthetic construct
  source 1..21: mol_type = other DNA
  modified_base 1: mod_base = OTHER; note = adenosine-3'-phosphate
  modified_base 2: mod_base = OTHER; note = cytidine-3'-phosphate
  modified_base 3: mod_base = OTHER; note = adenosine-3'-phosphate
  modified_base 4: mod_base = OTHER; note = adenosine-3'-phosphate
  modified_base 5: mod_base = OTHER; note = guanosine-3'-phosphate
  modified_base 6: mod_base = OTHER; note = uridine-3'-phosphate
  modified_base 7: mod_base = OTHER; note = adenosine-3'-phosphate
  modified_base 8: mod_base = OTHER; note = cytidine-3'-phosphate
  modified_base 9: mod_base = OTHER; note = cytidine-3'-phosphate
  modified_base 10: mod_base = OTHER; note = cytidine-3'-phosphate
  modified_base 11: mod_base = OTHER; note = uridine-3'-phosphate
  modified_base 12: mod_base = OTHER; note = adenosine-3'-phosphate
  modified_base 13: mod_base = OTHER; note = adenosine-3'-phosphate
  modified_base 14: mod_base = OTHER; note = guanosine-3'-phosphate
  modified_base 15: mod_base = OTHER; note = guanosine-3'-phosphate
  modified_base 16: mod_base = OTHER; note = adenosine-3'-phosphate
  modified_base 17: mod_base = OTHER; note = guanosine-3'-phosphate
  modified_base 18: mod_base = OTHER; note = guanosine-3'-phosphate
  modified_base 19: mod_base = OTHER; note = adenosine-3'-phosphate
  misc_feature 1..19: note = RNA
  misc_feature 20..21: note = DNA
acaagtaccctaaggaggatt

SEQ ID NO: 430 - DNA, 21 bp, synthetic construct
  source 1..21: mol_type = other DNA
  modified_base 1: mod_base = OTHER; note = adenosine-3'-phosphate
  modified_base 2: mod_base = OTHER; note = adenosine-3'-phosphate
  modified_base 3: mod_base = OTHER; note = guanosine-3'-phosphate
  modified_base 4: mod_base = OTHER; note = guanosine-3'-phosphate
  modified_base 5: mod_base = OTHER; note = adenosine-3'-phosphate
  modified_base 6: mod_base = OTHER; note = guanosine-3'-phosphate
  modified_base 7: mod_base = OTHER; note = guanosine-3'-phosphate
  modified_base 8: mod_base = OTHER; note = adenosine-3'-phosphate
  modified_base 9: mod_base = OTHER; note = cytidine-3'-phosphate
  modified_base 10: mod_base = OTHER; note = uridine-3'-phosphate
  modified_base 11: mod_base = OTHER; note = cytidine-3'-phosphate
  modified_base 12: mod_base = OTHER; note = guanosine-3'-phosphate
  modified_base 13: mod_base = OTHER; note = guanosine-3'-phosphate
  modified_base 14: mod_base = OTHER; note = adenosine-3'-phosphate
  modified_base 15: mod_base = OTHER; note = guanosine-3'-phosphate
  modified_base 16: mod_base = OTHER; note = adenosine-3'-phosphate
  modified_base 17: mod_base = OTHER; note = uridine-3'-phosphate
  modified_base 18: mod_base = OTHER; note = adenosine-3'-phosphate
  modified_base 19: mod_base = OTHER; note = adenosine-3'-phosphate
  misc_feature 1..19: note = RNA
  misc_feature 20..21: note = DNA
aaggaggactcggagataatt

SEQ ID NO: 431 - DNA, 21 bp, synthetic construct
  source 1..21: mol_type = other DNA
  modified_base 1: mod_base = OTHER; note = cytidine-3'-phosphate
  modified_base 2: mod_base = OTHER; note = guanosine-3'-phosphate
  modified_base 3: mod_base = OTHER; note = guanosine-3'-phosphate
  modified_base 4: mod_base = OTHER; note = adenosine-3'-phosphate
  modified_base 5: mod_base = OTHER; note = guanosine-3'-phosphate
  modified_base 6: mod_base = OTHER; note = adenosine-3'-phosphate
  modified_base 7: mod_base = OTHER; note = uridine-3'-phosphate
  modified_base 8: mod_base = OTHER; note = adenosine-3'-phosphate
  modified_base 9: mod_base = OTHER; note = adenosine-3'-phosphate
  modified_base 10: mod_base = OTHER; note = guanosine-3'-phosphate
  modified_base 11: mod_base = OTHER; note = guanosine-3'-phosphate
  modified_base 12: mod_base = OTHER; note = adenosine-3'-phosphate
  modified_base 13: mod_base = OTHER; note = guanosine-3'-phosphate
  modified_base 14: mod_base = OTHER; note = cytidine-3'-phosphate
  modified_base 15: mod_base = OTHER; note = cytidine-3'-phosphate
  modified_base 16: mod_base = OTHER; note = uridine-3'-phosphate
  modified_base 17: mod_base = OTHER; note = guanosine-3'-phosphate
  modified_base 18: mod_base = OTHER; note = cytidine-3'-phosphate
  modified_base 19: mod_base = OTHER; note = cytidine-3'-phosphate
  misc_feature 1..19: note = RNA
  misc_feature 20..21: note = DNA
cggagataaggagcctgcctt

SEQ ID NO: 432 - DNA, 21 bp, synthetic construct
  source 1..21: mol_type = other DNA
  modified_base 1: mod_base = OTHER; note = adenosine-3'-phosphate
  modified_base 2: mod_base = OTHER; note = guanosine-3'-phosphate
  modified_base 3: mod_base = OTHER; note = cytidine-3'-phosphate
  modified_base 4: mod_base = OTHER; note = cytidine-3'-phosphate
  modified_base 5: mod_base = OTHER; note = uridine-3'-phosphate
  modified_base 6: mod_base = OTHER; note = guanosine-3'-phosphate
  modified_base 7: mod_base = OTHER; note = cytidine-3'-phosphate
  modified_base 8: mod_base = OTHER; note = cytidine-3'-phosphate
  modified_base 9: mod_base = OTHER; note = adenosine-3'-phosphate
  modified_base 10: mod_base = OTHER; note = guanosine-3'-phosphate
  modified_base 11: mod_base = OTHER; note = adenosine-3'-phosphate
  modified_base 12: mod_base = OTHER; note = uridine-3'-phosphate
  modified_base 13: mod_base = OTHER; note = guanosine-3'-phosphate
  modified_base 14: mod_base = OTHER; note = uridine-3'-phosphate
  modified_base 15: mod_base = OTHER; note = guanosine-3'-phosphate
  modified_base 16: mod_base = OTHER; note = uridine-3'-phosphate
  modified_base 17: mod_base = OTHER; note = cytidine-3'-phosphate
  modified_base 18: mod_base = OTHER; note = uridine-3'-phosphate
  modified_base 19: mod_base = OTHER; note = guanosine-3'-phosphate
  misc_feature 1..19: note = RNA
  misc_feature 20..21: note = DNA
agcctgccagatgtgtctgtt

SEQ ID NO: 433 - DNA, 21 bp, synthetic construct
  source 1..21: mol_type = other DNA
  modified_base 1: mod_base = OTHER; note = uridine-3'-phosphate
  modified_base 2: mod_base = OTHER; note = guanosine-3'-phosphate
  modified_base 3: mod_base = OTHER; note = uridine-3'-phosphate
  modified_base 4: mod_base = OTHER; note = guanosine-3'-phosphate
  modified_base 5: mod_base = OTHER; note = uridine-3'-phosphate
  modified_base 6: mod_base = OTHER; note = cytidine-3'-phosphate
  modified_base 7: mod_base = OTHER; note = uridine-3'-phosphate
  modified_base 8: mod_base = OTHER; note = guanosine-3'-phosphate
  modified_base 9: mod_base = OTHER; note = cytidine-3'-phosphate
  modified_base 10: mod_base = OTHER; note = uridine-3'-phosphate
  modified_base 11: mod_base = OTHER; note = adenosine-3'-phosphate
  modified_base 12: mod_base = OTHER; note = cytidine-3'-phosphate
  modified_base 13: mod_base = OTHER; note = adenosine-3'-phosphate
  modified_base 14: mod_base = OTHER; note = guanosine-3'-phosphate
  modified_base 15: mod_base = OTHER; note = adenosine-3'-phosphate
  modified_base 16: mod_base = OTHER; note = cytidine-3'-phosphate
  modified_base 17: mod_base = OTHER; note = uridine-3'-phosphate
  modified_base 18: mod_base = OTHER; note = uridine-3'-phosphate
  modified_base 19: mod_base = OTHER; note = uridine-3'-phosphate
  misc_feature 1..19: note = RNA
  misc_feature 20..21: note = DNA
tgtgtctgctacagacttttt

SEQ ID NO: 434 - DNA, 21 bp, synthetic construct
  source 1..21: mol_type = other DNA
  modified_base 1: mod_base = OTHER; note = cytidine-3'-phosphate
  modified_base 2: mod_base = OTHER; note = adenosine-3'-phosphate
  modified_base 3: mod_base = OTHER; note = guanosine-3'-phosphate
  modified_base 4: mod_base = OTHER; note = adenosine-3'-phosphate
  modified_base 5: mod_base = OTHER; note = cytidine-3'-phosphate
  modified_base 6: mod_base = OTHER; note = uridine-3'-phosphate
  modified_base 7: mod_base = OTHER; note = uridine-3'-phosphate
  modified_base 8: mod_base = OTHER; note = uridine-3'-phosphate
  modified_base 9: mod_base = OTHER; note = guanosine-3'-phosphate
  modified_base 10: mod_base = OTHER; note = adenosine-3'-phosphate
  modified_base 11: mod_base = OTHER; note = guanosine-3'-phosphate
  modified_base 12: mod_base = OTHER; note = adenosine-3'-phosphate
  modified_base 13: mod_base = OTHER; note = adenosine-3'-phosphate
  modified_base 14: mod_base = OTHER; note = guanosine-3'-phosphate
  modified_base 15: mod_base = OTHER; note = guanosine-3'-phosphate
  modified_base 16: mod_base = OTHER; note = uridine-3'-phosphate
  modified_base 17: mod_base = OTHER; note = uridine-3'-phosphate
  modified_base 18: mod_base = OTHER; note = guanosine-3'-phosphate
  modified_base 19: mod_base = OTHER; note = adenosine-3'-phosphate
  misc_feature 1..19: note = RNA
  misc_feature 20..21: note = DNA
cagactttgagaaggttgatt

SEQ ID NO: 435 - DNA, 21 bp, synthetic construct
  source 1..21: mol_type = other DNA
  modified_base 1: mod_base = OTHER; note = adenosine-3'-phosphate
  modified_base 2: mod_base = OTHER; note = guanosine-3'-phosphate
  modified_base 3: mod_base = OTHER; note = guanosine-3'-phosphate
  modified_base 4: mod_base = OTHER; note = uridine-3'-phosphate
  modified_base 5: mod_base = OTHER; note = uridine-3'-phosphate
  modified_base 6: mod_base = OTHER; note = guanosine-3'-phosphate
  modified_base 7: mod_base = OTHER; note = adenosine-3'-phosphate
  modified_base 8: mod_base = OTHER; note = uridine-3'-phosphate
  modified_base 9: mod_base = OTHER; note = cytidine-3'-phosphate
  modified_base 10: mod_base = OTHER; note = uridine-3'-phosphate
  modified_base 11: mod_base = OTHER; note = guanosine-3'-phosphate
  modified_base 12: mod_base = OTHER; note = adenosine-3'-phosphate
  modified_base 13: mod_base = OTHER; note = cytidine-3'-phosphate
  modified_base 14: mod_base = OTHER; note = cytidine-3'-phosphate
  modified_base 15: mod_base = OTHER; note = cytidine-3'-phosphate
  modified_base 16: mod_base = OTHER; note = adenosine-3'-phosphate
  modified_base 17: mod_base = OTHER; note = guanosine-3'-phosphate
  modified_base 18: mod_base = OTHER; note = uridine-3'-phosphate
  modified_base 19: mod_base = OTHER; note = uridine-3'-phosphate
  misc_feature 1..19: note = RNA
  misc_feature 20..21: note = DNA
aggttgatctgacccagtttt

SEQ ID NO: 436 - DNA, 21 bp, synthetic construct
  source 1..21: mol_type = other DNA
  modified_base 1: mod_base = OTHER; note = adenosine-3'-phosphate
  modified_base 2: mod_base = OTHER; note = cytidine-3'-phosphate
  modified_base 3: mod_base = OTHER; note = cytidine-3'-phosphate
  modified_base 4: mod_base = OTHER; note = cytidine-3'-phosphate
  modified_base 5: mod_base = OTHER; note = adenosine-3'-phosphate
  modified_base 6: mod_base = OTHER; note = guanosine-3'-phosphate
  modified_base 7: mod_base = OTHER; note = uridine-3'-phosphate
  modified_base 8: mod_base = OTHER; note = uridine-3'-phosphate
  modified_base 9: mod_base = OTHER; note = cytidine-3'-phosphate
  modified_base 10: mod_base = OTHER; note = adenosine-3'-phosphate
  modified_base 11: mod_base = OTHER; note = adenosine-3'-phosphate
  modified_base 12: mod_base = OTHER; note = guanosine-3'-phosphate
  modified_base 13: mod_base = OTHER; note = uridine-3'-phosphate
  modified_base 14: mod_base = OTHER; note = guanosine-3'-phosphate
  modified_base 15: mod_base = OTHER; note = guanosine-3'-phosphate
  modified_base 16: mod_base = OTHER; note = adenosine-3'-phosphate
  modified_base 17: mod_base = OTHER; note = uridine-3'-phosphate
  modified_base 18: mod_base = OTHER; note = cytidine-3'-phosphate
  modified_base 19: mod_base = OTHER; note = cytidine-3'-phosphate
  misc_feature 1..19: note = RNA
  misc_feature 20..21: note = DNA
acccagttcaagtggatcctt

SEQ ID NO: 437 - DNA, 21 bp, synthetic construct
  source 1..21: mol_type = other DNA
  modified_base 1: mod_base = OTHER; note = adenosine-3'-phosphate
  modified_base 2: mod_base = OTHER; note = guanosine-3'-phosphate
  modified_base 3: mod_base = OTHER; note = uridine-3'-phosphate
  modified_base 4: mod_base = OTHER; note = guanosine-3'-phosphate
  modified_base 5: mod_base = OTHER; note = guanosine-3'-phosphate
  modified_base 6: mod_base = OTHER; note = adenosine-3'-phosphate
  modified_base 7: mod_base = OTHER; note = uridine-3'-phosphate
  modified_base 8: mod_base = OTHER; note = cytidine-3'-phosphate
  modified_base 9: mod_base = OTHER; note = cytidine-3'-phosphate
  modified_base 10: mod_base = OTHER; note = adenosine-3'-phosphate
  modified_base 11: mod_base = OTHER; note = cytidine-3'-phosphate
  modified_base 12: mod_base = OTHER; note = adenosine-3'-phosphate
  modified_base 13: mod_base = OTHER; note = uridine-3'-phosphate
  modified_base 14: mod_base = OTHER; note = uridine-3'-phosphate
  modified_base 15: mod_base = OTHER; note = guanosine-3'-phosphate
  modified_base 16: mod_base = OTHER; note = adenosine-3'-phosphate
  modified_base 17: mod_base = OTHER; note = guanosine-3'-phosphate
  modified_base 18: mod_base = OTHER; note = guanosine-3'-phosphate
  modified_base 19: mod_base = OTHER; note = guanosine-3'-phosphate
  misc_feature 1..19: note = RNA
  misc_feature 20..21: note = DNA
agtggatccacattgagggtt

SEQ ID NO: 438 - DNA, 21 bp, synthetic construct
  source 1..21: mol_type = other DNA
  modified_base 1: mod_base = OTHER; note = uridine-3'-phosphate
  modified_base 2: mod_base = OTHER; note = uridine-3'-phosphate
  modified_base 3: mod_base = OTHER; note = guanosine-3'-phosphate
  modified_base 4: mod_base = OTHER; note = adenosine-3'-phosphate
  modified_base 5: mod_base = OTHER; note = guanosine-3'-phosphate
  modified_base 6: mod_base = OTHER; note = guanosine-3'-phosphate
  modified_base 7: mod_base = OTHER; note = guanosine-3'-phosphate
  modified_base 8: mod_base = OTHER; note = cytidine-3'-phosphate
  modified_base 9: mod_base = OTHER; note = cytidine-3'-phosphate
  modified_base 10: mod_base = OTHER; note = guanosine-3'-phosphate
  modified_base 11: mod_base = OTHER; note = guanosine-3'-phosphate
  modified_base 12: mod_base = OTHER; note = adenosine-3'-phosphate
  modified_base 13: mod_base = OTHER; note = adenosine-3'-phosphate
  modified_base 14: mod_base = OTHER; note = cytidine-3'-phosphate
  modified_base 15: mod_base = OTHER; note = guanosine-3'-phosphate
  modified_base 16: mod_base = OTHER; note = cytidine-3'-phosphate
  modified_base 17: mod_base = OTHER; note = adenosine-3'-phosphate
  modified_base 18: mod_base = OTHER; note = uridine-3'-phosphate
  modified_base 19: mod_base = OTHER; note = cytidine-3'-phosphate
  misc_feature 1..19: note = RNA
  misc_feature 20..21: note = DNA
ttgagggccggaacgcatctt

SEQ ID NO: 439 - DNA, 21 bp, synthetic construct
  source 1..21: mol_type = other DNA
  modified_base 1: mod_base = OTHER; note = adenosine-3'-phosphate
  modified_base 2: mod_base = OTHER; note = adenosine-3'-phosphate
  modified_base 3: mod_base = OTHER; note = cytidine-3'-phosphate
  modified_base 4: mod_base = OTHER; note = guanosine-3'-phosphate
  modified_base 5: mod_base = OTHER; note = cytidine-3'-phosphate
  modified_base 6: mod_base = OTHER; note = adenosine-3'-phosphate
  modified_base 7: mod_base = OTHER; note = uridine-3'-phosphate
  modified_base 8: mod_base = OTHER; note = cytidine-3'-phosphate
  modified_base 9: mod_base = OTHER; note = guanosine-3'-phosphate
  modified_base 10: mod_base = OTHER; note = guanosine-3'-phosphate
  modified_base 11: mod_base = OTHER; note = adenosine-3'-phosphate
  modified_base 12: mod_base = OTHER; note = guanosine-3'-phosphate
  modified_base 13: mod_base = OTHER; note = cytidine-3'-phosphate
  modified_base 14: mod_base = OTHER; note = adenosine-3'-phosphate
  modified_base 15: mod_base = OTHER; note = guanosine-3'-phosphate
  modified_base 16: mod_base = OTHER; note = guanosine-3'-phosphate
  modified_base 17: mod_base = OTHER; note = uridine-3'-phosphate
  modified_base 18: mod_base = OTHER; note = guanosine-3'-phosphate
  modified_base 19: mod_base = OTHER; note = adenosine-3'-phosphate
  misc_feature 1..19: note = RNA
  misc_feature 20..21: note = DNA
aacgcatcggagcaggtgatt

SEQ ID NO: 440 - DNA, 21 bp, synthetic construct
  source 1..21: mol_type = other DNA
  modified_base 1: mod_base = OTHER; note = adenosine-3'-phosphate
  modified_base 2: mod_base = OTHER; note = guanosine-3'-phosphate
  modified_base 3: mod_base = OTHER; note = cytidine-3'-phosphate
  modified_base 4: mod_base = OTHER; note = adenosine-3'-phosphate
  modified_base 5: mod_base = OTHER; note = guanosine-3'-phosphate
  modified_base 6: mod_base = OTHER; note = guanosine-3'-phosphate
  modified_base 7: mod_base = OTHER; note = uridine-3'-phosphate
  modified_base 8: mod_base = OTHER; note = guanosine-3'-phosphate
  modified_base 9: mod_base = OTHER; note = adenosine-3'-phosphate
  modified_base 10: mod_base = OTHER; note = adenosine-3'-phosphate
  modified_base 11: mod_base = OTHER; note = guanosine-3'-phosphate
  modified_base 12: mod_base = OTHER; note = adenosine-3'-phosphate
  modified_base 13: mod_base = OTHER; note = uridine-3'-phosphate
  modified_base 14: mod_base = OTHER; note = guanosine-3'-phosphate
  modified_base 15: mod_base = OTHER; note = cytidine-3'-phosphate
  modified_base 16: mod_base = OTHER; note = uridine-3'-phosphate
  modified_base 17: mod_base = OTHER; note = guanosine-3'-phosphate
  modified_base 18: mod_base = OTHER; note = cytidine-3'-phosphate
  modified_base 19: mod_base = OTHER; note = adenosine-3'-phosphate
  misc_feature 1..19: note = RNA
  misc_feature 20..21: note = DNA
agcaggtgaagatgctgcatt

SEQ ID NO: 441 - DNA, 21 bp, synthetic construct
  source 1..21: mol_type = other DNA
  modified_base 1: mod_base = OTHER; note = uridine-3'-phosphate
  modified_base 2: mod_base = OTHER; note = guanosine-3'-phosphate
  modified_base 3: mod_base = OTHER; note = cytidine-3'-phosphate
  modified_base 4: mod_base = OTHER; note = uridine-3'-phosphate
  modified_base 5: mod_base = OTHER; note = guanosine-3'-phosphate
  modified_base 6: mod_base = OTHER; note = cytidine-3'-phosphate
  modified_base 7: mod_base = OTHER; note = adenosine-3'-phosphate
  modified_base 8: mod_base = OTHER; note = guanosine-3'-phosphate
  modified_base 9: mod_base = OTHER; note = cytidine-3'-phosphate
  modified_base 10: mod_base = OTHER; note = guanosine-3'-phosphate
  modified_base 11: mod_base = OTHER; note = guanosine-3'-phosphate
  modified_base 12: mod_base = OTHER; note = adenosine-3'-phosphate
  modified_base 13: mod_base = OTHER; note = uridine-3'-phosphate
  modified_base 14: mod_base = OTHER; note = adenosine-3'-phosphate
  modified_base 15: mod_base = OTHER; note = guanosine-3'-phosphate
  modified_base 16: mod_base = OTHER; note = adenosine-3'-phosphate
  modified_base 17: mod_base = OTHER; note = cytidine-3'-phosphate
  modified_base 18: mod_base = OTHER; note = guanosine-3'-phosphate
  modified_base 19: mod_base = OTHER; note = cytidine-3'-phosphate
  misc_feature 1..19: note = RNA
  misc_feature 20..21: note = DNA
tgctgcagcggatagacgctt

SEQ ID NO: 442 - DNA, 21 bp, synthetic construct
  source 1..21: mol_type = other DNA
  modified_base 1: mod_base = OTHER; note = adenosine-3'-phosphate
  modified_base 2: mod_base = OTHER; note = uridine-3'-phosphate
  modified_base 3: mod_base = OTHER; note = adenosine-3'-phosphate
  modified_base 4: mod_base = OTHER; note = guanosine-3'-phosphate
  modified_base 5: mod_base = OTHER; note = adenosine-3'-phosphate
  modified_base 6: mod_base = OTHER; note = cytidine-3'-phosphate
  modified_base 7: mod_base = OTHER; note = guanosine-3'-phosphate
  modified_base 8: mod_base = OTHER; note = cytidine-3'-phosphate
  modified_base 9: mod_base = OTHER; note = adenosine-3'-phosphate
  modified_base 10: mod_base = OTHER; note = cytidine-3'-phosphate
  modified_base 11: mod_base = OTHER; note = adenosine-3'-phosphate
  modified_base 12: mod_base = OTHER; note = cytidine-3'-phosphate
  modified_base 13: mod_base = OTHER; note = adenosine-3'-phosphate
  modified_base 14: mod_base = OTHER; note = adenosine-3'-phosphate
  modified_base 15: mod_base = OTHER; note = cytidine-3'-phosphate
  modified_base 16: mod_base = OTHER; note = adenosine-3'-phosphate
  modified_base 17: mod_base = OTHER; note = cytidine-3'-phosphate
  modified_base 18: mod_base = OTHER; note = cytidine-3'-phosphate
  modified_base 19: mod_base = OTHER; note = adenosine-3'-phosphate
  misc_feature 1..19: note = RNA
  misc_feature 20..21: note = DNA
atagacgcacacaacaccatt

SEQ ID NO: 443 - DNA, 21 bp, synthetic construct
  source 1..21: mol_type = other DNA
  modified_base 1: mod_base = OTHER; note = cytidine-3'-phosphate
  modified_base 2: mod_base = OTHER; note = adenosine-3'-phosphate
  modified_base 3: mod_base = OTHER; note = guanosine-3'-phosphate
  modified_base 4: mod_base = OTHER; note = cytidine-3'-phosphate
  modified_base 5: mod_base = OTHER; note = cytidine-3'-phosphate
  modified_base 6: mod_base = OTHER; note = uridine-3'-phosphate
  modified_base 7: mod_base = OTHER; note = cytidine-3'-phosphate
  modified_base 8: mod_base = OTHER; note = cytidine-3'-phosphate
  modified_base 9: mod_base = OTHER; note = adenosine-3'-phosphate
  modified_base 10: mod_base = OTHER; note = guanosine-3'-phosphate
  modified_base 11: mod_base = OTHER; note = adenosine-3'-phosphate
  modified_base 12: mod_base = OTHER; note = guanosine-3'-phosphate
  modified_base 13: mod_base = OTHER; note = cytidine-3'-phosphate
  modified_base 14: mod_base = OTHER; note = adenosine-3'-phosphate
  modified_base 15: mod_base = OTHER; note = guanosine-3'-phosphate
  modified_base 16: mod_base = OTHER; note = adenosine-3'-phosphate
  modified_base 17: mod_base = OTHER; note = adenosine-3'-phosphate
  modified_base 18: mod_base = OTHER; note = guanosine-3'-phosphate
  modified_base 19: mod_base = OTHER; note = adenosine-3'-phosphate
  misc_feature 1..19: note = RNA
  misc_feature 20..21: note = DNA
cagcctccagagcagaagatt

SEQ ID NO: 444 - DNA, 21 bp, synthetic construct
  source 1..21: mol_type = other DNA
  modified_base 1: mod_base = OTHER; note = adenosine-3'-phosphate
  modified_base 2: mod_base = OTHER; note = guanosine-3'-phosphate
  modified_base 3: mod_base = OTHER; note = adenosine-3'-phosphate
  modified_base 4: mod_base = OTHER; note = adenosine-3'-phosphate
  modified_base 5: mod_base = OTHER; note = guanosine-3'-phosphate
  modified_base 6: mod_base = OTHER; note = adenosine-3'-phosphate
  modified_base 7: mod_base = OTHER; note = uridine-3'-phosphate
  modified_base 8: mod_base = OTHER; note = cytidine-3'-phosphate
  modified_base 9: mod_base = OTHER; note = cytidine-3'-phosphate
  modified_base 10: mod_base = OTHER; note = guanosine-3'-phosphate
  modified_base 11: mod_base = OTHER; note = guanosine-3'-phosphate
  modified_base 12: mod_base = OTHER; note = guanosine-3'-phosphate
  modified_base 13: mod_base = OTHER; note = uridine-3'-phosphate
  modified_base 14: mod_base = OTHER; note = guanosine-3'-phosphate
  modified_base 15: mod_base = OTHER; note = uridine-3'-phosphate
  modified_base 16: mod_base = OTHER; note = cytidine-3'-phosphate
  modified_base 17: mod_base = OTHER; note = cytidine-3'-phosphate
  modified_base 18: mod_base = OTHER; note = guanosine-3'-phosphate
  modified_base 19: mod_base = OTHER; note = uridine-3'-phosphate
  misc_feature 1..19: note = RNA
  misc_feature 20..21: note = DNA
agaagatccgggtgtccgttt

SEQ ID NO: 445 - DNA, 21 bp, synthetic construct
  source 1..21: mol_type = other DNA
  modified_base 1: mod_base = OTHER; note = guanosine-3'-phosphate
  modified_base 2: mod_base = OTHER; note = uridine-3'-phosphate
  modified_base 3: mod_base = OTHER; note = guanosine-3'-phosphate
  modified_base 4: mod_base = OTHER; note = uridine-3'-phosphate
  modified_base 5: mod_base = OTHER; note = cytidine-3'-phosphate
  modified_base 6: mod_base = OTHER; note = cytidine-3'-phosphate
  modified_base 7: mod_base = OTHER; note = guanosine-3'-phosphate
  modified_base 8: mod_base = OTHER; note = uridine-3'-phosphate
  modified_base 9: mod_base = OTHER; note = guanosine-3'-phosphate
  modified_base 10: mod_base = OTHER; note = guanosine-3'-phosphate
  modified_base 11: mod_base = OTHER; note = adenosine-3'-phosphate
  modified_base 12: mod_base = OTHER; note = guanosine-3'-phosphate
  modified_base 13: mod_base = OTHER; note = guanosine-3'-phosphate
  modified_base 14: mod_base = OTHER; note = uridine-3'-phosphate
  modified_base 15: mod_base = OTHER; note = guanosine-3'-phosphate
  modified_base 16: mod_base = OTHER; note = guanosine-3'-phosphate
  modified_base 17: mod_base = OTHER; note = adenosine-3'-phosphate
  modified_base 18: mod_base = OTHER; note = guanosine-3'-phosphate
  modified_base 19: mod_base = OTHER; note = adenosine-3'-phosphate
  misc_feature 1..19: note = RNA
  misc_feature 20..21: note = DNA
gtgtccgtggaggtggagatt

SEQ ID NO: 446 - DNA, 21 bp, synthetic construct
  source 1..21: mol_type = other DNA
  modified_base 1: mod_base = OTHER; note = adenosine-3'-phosphate
  modified_base 2: mod_base = OTHER; note = guanosine-3'-phosphate
  modified_base 3: mod_base = OTHER; note = guanosine-3'-phosphate
  modified_base 4: mod_base = OTHER; note = uridine-3'-phosphate
  modified_base 5: mod_base = OTHER; note = guanosine-3'-phosphate
  modified_base 6: mod_base = OTHER; note = guanosine-3'-phosphate
  modified_base 7: mod_base = OTHER; note = adenosine-3'-phosphate
  modified_base 8: mod_base = OTHER; note = guanosine-3'-phosphate
  modified_base 9: mod_base = OTHER; note = adenosine-3'-phosphate
  modified_base 10: mod_base = OTHER; note = adenosine-3'-phosphate
  modified_base 11: mod_base = OTHER; note = guanosine-3'-phosphate
  modified_base 12: mod_base = OTHER; note = cytidine-3'-phosphate
  modified_base 13: mod_base = OTHER; note = cytidine-3'-phosphate
  modified_base 14: mod_base = OTHER; note = adenosine-3'-phosphate
  modified_base 15: mod_base = OTHER; note = cytidine-3'-phosphate
  modified_base 16: mod_base = OTHER; note = guanosine-3'-phosphate
  modified_base 17: mod_base = OTHER; note = adenosine-3'-phosphate
  modified_base 18: mod_base = OTHER; note = guanosine-3'-phosphate
  modified_base 19: mod_base = OTHER; note = adenosine-3'-phosphate
  misc_feature 1..19: note = RNA
  misc_feature 20..21: note = DNA
aggtggagaagccacgagatt

SEQ ID NO: 447 - DNA, 21 bp, synthetic construct
  source 1..21: mol_type = other DNA
  modified_base 1: mod_base = OTHER; note = cytidine-3'-phosphate
  modified_base 2: mod_base = OTHER; note = cytidine-3'-phosphate
  modified_base 3: mod_base = OTHER; note = adenosine-3'-phosphate
  modified_base 4: mod_base = OTHER; note = cytidine-3'-phosphate
  modified_base 5: mod_base = OTHER; note = guanosine-3'-phosphate
  modified_base 6: mod_base = OTHER; note = adenosine-3'-phosphate
  modified_base 7: mod_base = OTHER; note = guanosine-3'-phosphate
  modified_base 8: mod_base = OTHER; note = adenosine-3'-phosphate
  modified_base 9: mod_base = OTHER; note = guanosine-3'-phosphate
  modified_base 10: mod_base = OTHER; note = guanosine-3'-phosphate
  modified_base 11: mod_base = OTHER; note = adenosine-3'-phosphate
  modified_base 12: mod_base = OTHER; note = guanosine-3'-phosphate
  modified_base 13: mod_base = OTHER; note = cytidine-3'-phosphate
  modified_base 14: mod_base = OTHER; note = uridine-3'-phosphate
  modified_base 15: mod_base = OTHER; note = cytidine-3'-phosphate
  modified_base 16: mod_base = OTHER; note = uridine-3'-phosphate
  modified_base 17: mod_base = OTHER; note = uridine-3'-phosphate
  modified_base 18: mod_base = OTHER; note = cytidine-3'-phosphate
  modified_base 19: mod_base = OTHER; note = cytidine-3'-phosphate
  misc_feature 1..19: note = RNA
  misc_feature 20..21: note = DNA
ccacgagaggagctcttcctt

SEQ ID NO: 448 - DNA, 21 bp, synthetic construct
  source 1..21: mol_type = other DNA
  modified_base 1: mod_base = OTHER; note = adenosine-3'-phosphate
  modified_base 2: mod_base = OTHER; note = guanosine-3'-phosphate
  modified_base 3: mod_base = OTHER; note = cytidine-3'-phosphate
  modified_base 4: mod_base = OTHER; note = uridine-3'-phosphate
  modified_base 5: mod_base = OTHER; note = cytidine-3'-phosphate
  modified_base 6: mod_base = OTHER; note = uridine-3'-phosphate
  modified_base 7: mod_base = OTHER; note = uridine-3'-phosphate
  modified_base 8: mod_base = OTHER; note = cytidine-3'-phosphate
  modified_base 9: mod_base = OTHER; note = cytidine-3'-phosphate
  modified_base 10: mod_base = OTHER; note = adenosine-3'-phosphate
  modified_base 11: mod_base = OTHER; note = guanosine-3'-phosphate
  modified_base 12: mod_base = OTHER; note = cytidine-3'-phosphate
  modified_base 13: mod_base = OTHER; note = uridine-3'-phosphate
  modified_base 14: mod_base = OTHER; note = guanosine-3'-phosphate
  modified_base 15: mod_base = OTHER; note = uridine-3'-phosphate
  modified_base 16: mod_base = OTHER; note = uridine-3'-phosphate
  modified_base 17: mod_base = OTHER; note = uridine-3'-phosphate
  modified_base 18: mod_base = OTHER; note = guanosine-3'-phosphate
  modified_base 19: mod_base = OTHER; note = guanosine-3'-phosphate
  misc_feature 1..19: note = RNA
  misc_feature 20..21: note = DNA
agctcttccagctgtttggtt

SEQ ID NO: 449 - DNA, 21 bp, synthetic construct
  source 1..21: mol_type = other DNA
  modified_base 1: mod_base = OTHER; note = uridine-3'-phosphate
  modified_base 2: mod_base = OTHER; note = guanosine-3'-phosphate
  modified_base 3: mod_base = OTHER; note = uridine-3'-phosphate
  modified_base 4: mod_base = OTHER; note = uridine-3'-phosphate
  modified_base 5: mod_base = OTHER; note = uridine-3'-phosphate
  modified_base 6: mod_base = OTHER; note = guanosine-3'-phosphate
  modified_base 7: mod_base = OTHER; note = guanosine-3'-phosphate
  modified_base 8: mod_base = OTHER; note = cytidine-3'-phosphate
  modified_base 9: mod_base = OTHER; note = uridine-3'-phosphate
  modified_base 10: mod_base = OTHER; note = adenosine-3'-phosphate
  modified_base 11: mod_base = OTHER; note = cytidine-3'-phosphate
  modified_base 12: mod_base = OTHER; note = guanosine-3'-phosphate
  modified_base 13: mod_base = OTHER; note = guanosine-3'-phosphate
  modified_base 14: mod_base = OTHER; note = adenosine-3'-phosphate
  modified_base 15: mod_base = OTHER; note = guanosine-3'-phosphate
  modified_base 16: mod_base = OTHER; note = adenosine-3'-phosphate
  modified_base 17: mod_base = OTHER; note = cytidine-3'-phosphate
  modified_base 18: mod_base = OTHER; note = guanosine-3'-phosphate
  modified_base 19: mod_base = OTHER; note = uridine-3'-phosphate
  misc_feature 1..19: note = RNA
  misc_feature 20..21: note = DNA
tgtttggctacggagacgttt

SEQ ID NO: 450 - DNA, 21 bp, synthetic construct
  source 1..21: mol_type = other DNA
  modified_base 1: mod_base = OTHER; note = guanosine-3'-phosphate
  modified_base 2: mod_base = OTHER; note = guanosine-3'-phosphate
  modified_base 3: mod_base = OTHER; note = adenosine-3'-phosphate
  modified_base 4: mod_base = OTHER; note = guanosine-3'-phosphate
  modified_base 5: mod_base = OTHER; note = adenosine-3'-phosphate
  modified_base 6: mod_base = OTHER; note = cytidine-3'-phosphate
  modified_base 7: mod_base = OTHER; note = guanosine-3'-phosphate
  modified_base 8: mod_base = OTHER; note = uridine-3'-phosphate
  modified_base 9: mod_base = OTHER; note = guanosine-3'-phosphate
  modified_base 10: mod_base = OTHER; note = guanosine-3'-phosphate
  modified_base 11: mod_base = OTHER; note = uridine-3'-phosphate
  modified_base 12: mod_base = OTHER; note = guanosine-3'-phosphate
  modified_base 13: mod_base = OTHER; note = uridine-3'-phosphate
  modified_base 14: mod_base = OTHER; note = uridine-3'-phosphate
  modified_base 15: mod_base = OTHER; note = uridine-3'-phosphate
  modified_base 16: mod_base = OTHER; note = guanosine-3'-phosphate
  modified_base 17: mod_base = OTHER; note = uridine-3'-phosphate
  modified_base 18: mod_base = OTHER; note = cytidine-3'-phosphate
  modified_base 19: mod_base = OTHER; note = adenosine-3'-phosphate
  misc_feature 1..19: note = RNA
  misc_feature 20..21: note = DNA
ggagacgtggtgtttgtcatt

SEQ ID NO: 451 - DNA, 21 bp, synthetic construct
  source 1..21: mol_type = other DNA
  modified_base 1: mod_base = OTHER; note = uridine-3'-phosphate
  modified_base 2: mod_base = OTHER; note = uridine-3'-phosphate
  modified_base 3: mod_base = OTHER; note = uridine-3'-phosphate
  modified_base 4: mod_base = OTHER; note = guanosine-3'-phosphate
  modified_base 5: mod_base = OTHER; note = uridine-3'-phosphate
  modified_base 6: mod_base = OTHER; note = cytidine-3'-phosphate
  modified_base 7: mod_base = OTHER; note = adenosine-3'-phosphate
  modified_base 8: mod_base = OTHER; note = guanosine-3'-phosphate
  modified_base 9: mod_base = OTHER; note = cytidine-3'-phosphate
  modified_base 10: mod_base = OTHER; note = adenosine-3'-phosphate
  modified_base 11: mod_base = OTHER; note = adenosine-3'-phosphate
  modified_base 12: mod_base = OTHER; note = adenosine-3'-phosphate
  modified_base 13: mod_base = OTHER; note = guanosine-3'-phosphate
  modified_base 14: mod_base = OTHER; note = adenosine-3'-phosphate
  modified_base 15: mod_base = OTHER; note = uridine-3'-phosphate
  modified_base 16: mod_base = OTHER; note = guanosine-3'-phosphate
  modified_base 17: mod_base = OTHER; note = uridine-3'-phosphate
  modified_base 18: mod_base = OTHER; note = guanosine-3'-phosphate
  modified_base 19: mod_base = OTHER; note = guanosine-3'-phosphate
  misc_feature 1..19: note = RNA
  misc_feature 20..21: note = DNA
tttgtcagcaaagatgtggtt

SEQ ID NO: 452 - DNA, 21 bp, synthetic construct
  source 1..21: mol_type = other DNA
  modified_base 1: mod_base = OTHER; note = adenosine-3'-phosphate
  modified_base 2: mod_base = OTHER; note = adenosine-3'-phosphate
  modified_base 3: mod_base = OTHER; note = adenosine-3'-phosphate
  modified_base 4: mod_base = OTHER; note = guanosine-3'-phosphate
  modified_base 5: mod_base = OTHER; note = adenosine-3'-phosphate
  modified_base 6: mod_base = OTHER; note = uridine-3'-phosphate
  modified_base 7: mod_base = OTHER; note = guanosine-3'-phosphate
  modified_base 8: mod_base = OTHER; note = uridine-3'-phosphate
  modified_base 9: mod_base = OTHER; note = guanosine-3'-phosphate
  modified_base 10: mod_base = OTHER; note = guanosine-3'-phosphate
  modified_base 11: mod_base = OTHER; note = cytidine-3'-phosphate
  modified_base 12: mod_base = OTHER; note = cytidine-3'-phosphate
  modified_base 13: mod_base = OTHER; note = adenosine-3'-phosphate
  modified_base 14: mod_base = OTHER; note = adenosine-3'-phosphate
  modified_base 15: mod_base = OTHER; note = guanosine-3'-phosphate
  modified_base 16: mod_base = OTHER; note = cytidine-3'-phosphate
  modified_base 17: mod_base = OTHER; note = adenosine-3'-phosphate
  modified_base 18: mod_base = OTHER; note = cytidine-3'-phosphate
  modified_base 19: mod_base = OTHER; note = uridine-3'-phosphate
  misc_feature 1..19: note = RNA
  misc_feature 20..21: note = DNA
aaagatgtggccaagcacttt

SEQ ID NO: 453 - DNA, 21 bp, synthetic construct
  source 1..21: mol_type = other DNA
  modified_base 1: mod_base = OTHER; note = adenosine-3'-phosphate
  modified_base 2: mod_base = OTHER; note = adenosine-3'-phosphate
  modified_base 3: mod_base = OTHER; note = guanosine-3'-phosphate
  modified_base 4: mod_base = OTHER; note = cytidine-3'-phosphate
  modified_base 5: mod_base = OTHER; note = adenosine-3'-phosphate
  modified_base 6: mod_base = OTHER; note = cytidine-3'-phosphate
  modified_base 7: mod_base = OTHER; note = uridine-3'-phosphate
  modified_base 8: mod_base = OTHER; note = uridine-3'-phosphate
  modified_base 9: mod_base = OTHER; note = guanosine-3'-phosphate
  modified_base 10: mod_base = OTHER; note = guanosine-3'-phosphate
  modified_base 11: mod_base = OTHER; note = guanosine-3'-phosphate
  modified_base 12: mod_base = OTHER; note = guanosine-3'-phosphate
  modified_base 13: mod_base = OTHER; note = uridine-3'-phosphate
  modified_base 14: mod_base = OTHER; note = uridine-3'-phosphate
  modified_base 15: mod_base = OTHER; note = cytidine-3'-phosphate
  modified_base 16: mod_base = OTHER; note = cytidine-3'-phosphate
  modified_base 17: mod_base = OTHER; note = adenosine-3'-phosphate
  modified_base 18: mod_base = OTHER; note = guanosine-3'-phosphate
  modified_base 19: mod_base = OTHER; note = uridine-3'-phosphate
  misc_feature 1..19: note = RNA
  misc_feature 20..21: note = DNA
aagcacttggggttccagttt

SEQ ID NO: 454 - DNA, 21 bp, synthetic construct
  source 1..21: mol_type = other DNA
  modified_base 1: mod_base = OTHER; note = uridine-3'-phosphate
  modified_base 2: mod_base = OTHER; note = uridine-3'-phosphate
  modified_base 3: mod_base = OTHER; note = cytidine-3'-phosphate
  modified_base 4: mod_base = OTHER; note = cytidine-3'-phosphate
  modified_base 5: mod_base = OTHER; note = adenosine-3'-phosphate
  modified_base 6: mod_base = OTHER; note = guanosine-3'-phosphate
  modified_base 7: mod_base = OTHER; note = uridine-3'-phosphate
  modified_base 8: mod_base = OTHER; note = cytidine-3'-phosphate
  modified_base 9: mod_base = OTHER; note = adenosine-3'-phosphate
  modified_base 10: mod_base = OTHER; note = guanosine-3'-phosphate
  modified_base 11: mod_base = OTHER; note = cytidine-3'-phosphate
  modified_base 12: mod_base = OTHER; note = adenosine-3'-phosphate
  modified_base 13: mod_base = OTHER; note = guanosine-3'-phosphate
  modified_base 14: mod_base = OTHER; note = adenosine-3'-phosphate
  modified_base 15: mod_base = OTHER; note = guanosine-3'-phosphate
  modified_base 16: mod_base = OTHER; note = guanosine-3'-phosphate
  modified_base 17: mod_base = OTHER; note = adenosine-3'-phosphate
  modified_base 18: mod_base = OTHER; note = adenosine-3'-phosphate
  modified_base 19: mod_base = OTHER; note = guanosine-3'-phosphate
  misc_feature 1..19: note = RNA
  misc_feature 20..21: note = DNA
ttccagtcagcagaggaagtt

SEQ ID NO: 455 - DNA, 21 bp, synthetic construct
  source 1..21: mol_type = other DNA
  modified_base 1: mod_base = OTHER; note = adenosine-3'-phosphate
  modified_base 2: mod_base = OTHER; note = guanosine-3'-phosphate
  modified_base 3: mod_base = OTHER; note = adenosine-3'-phosphate
  modified_base 4: mod_base = OTHER; note = guanosine-3'-phosphate
  modified_base 5: mod_base = OTHER; note = guanosine-3'-phosphate
  modified_base 6: mod_base = OTHER; note = adenosine-3'-phosphate
  modified_base 7: mod_base = OTHER; note = adenosine-3'-phosphate
  modified_base 8: mod_base = OTHER; note = guanosine-3'-phosphate
  modified_base 9: mod_base = OTHER; note = cytidine-3'-phosphate
  modified_base 10: mod_base = OTHER; note = cytidine-3'-phosphate
  modified_base 11: mod_base = OTHER; note = uridine-3'-phosphate
  modified_base 12: mod_base = OTHER; note = uridine-3'-phosphate
  modified_base 13: mod_base = OTHER; note = guanosine-3'-phosphate
  modified_base 14: mod_base = OTHER; note = adenosine-3'-phosphate
  modified_base 15: mod_base = OTHER; note = guanosine-3'-phosphate
  modified_base 16: mod_base = OTHER; note = guanosine-3'-phosphate
  modified_base 17: mod_base = OTHER; note = guanosine-3'-phosphate
  modified_base 18: mod_base = OTHER; note = guanosine-3'-phosphate
  modified_base 19: mod_base = OTHER; note = cytidine-3'-phosphate
  misc_feature 1..19: note = RNA
  misc_feature 20..21: note = DNA
agaggaagccttgaggggctt

SEQ ID NO: 456 - DNA, 21 bp, synthetic construct
  source 1..21: mol_type = other DNA
  modified_base 1: mod_base = OTHER; note = uridine-3'-phosphate
  modified_base 2: mod_base = OTHER; note = uridine-3'-phosphate
  modified_base 3: mod_base = OTHER; note = guanosine-3'-phosphate
  modified_base 4: mod_base = OTHER; note = adenosine-3'-phosphate
  modified_base 5: mod_base = OTHER; note = guanosine-3'-phosphate
  modified_base 6: mod_base = OTHER; note = guanosine-3'-phosphate
  modified_base 7: mod_base = OTHER; note = guanosine-3'-phosphate
  modified_base 8: mod_base = OTHER; note = guanosine-3'-phosphate
  modified_base 9: mod_base = OTHER; note = cytidine-3'-phosphate
  modified_base 10: mod_base = OTHER; note = uridine-3'-phosphate
  modified_base 11: mod_base = OTHER; note = uridine-3'-phosphate
  modified_base 12: mod_base = OTHER; note = guanosine-3'-phosphate
  modified_base 13: mod_base = OTHER; note = uridine-3'-phosphate
  modified_base 14: mod_base = OTHER; note = adenosine-3'-phosphate
  modified_base 15: mod_base = OTHER; note = uridine-3'-phosphate
  modified_base 16: mod_base = OTHER; note = guanosine-3'-phosphate
  modified_base 17: mod_base = OTHER; note = guanosine-3'-phosphate
  modified_base 18: mod_base = OTHER; note = uridine-3'-phosphate
  modified_base 19: mod_base = OTHER; note = cytidine-3'-phosphate
  misc_feature 1..19: note = RNA
  misc_feature 20..21: note = DNA
ttgaggggcttgtatggtctt

SEQ ID NO: 457 - DNA, 21 bp, synthetic construct
  source 1..21: mol_type = other DNA
  modified_base 1: mod_base = OTHER; note = uridine-3'-phosphate
  modified_base 2: mod_base = OTHER; note = adenosine-3'-phosphate
  modified_base 3: mod_base = OTHER; note = uridine-3'-phosphate
  modified_base 4: mod_base = OTHER; note = guanosine-3'-phosphate
  modified_base 5: mod_base = OTHER; note = guanosine-3'-phosphate
  modified_base 6: mod_base = OTHER; note = uridine-3'-phosphate
  modified_base 7: mod_base = OTHER; note = cytidine-3'-phosphate
  modified_base 8: mod_base = OTHER; note = guanosine-3'-phosphate
  modified_base 9: mod_base = OTHER; note = uridine-3'-phosphate
  modified_base 10: mod_base = OTHER; note = guanosine-3'-phosphate
  modified_base 11: mod_base = OTHER; note = uridine-3'-phosphate
  modified_base 12: mod_base = OTHER; note = guanosine-3'-phosphate
  modified_base 13: mod_base = OTHER; note = adenosine-3'-phosphate
  modified_base 14: mod_base = OTHER; note = guanosine-3'-phosphate
  modified_base 15: mod_base = OTHER; note = guanosine-3'-phosphate
  modified_base 16: mod_base = OTHER; note = adenosine-3'-phosphate
  modified_base 17: mod_base = OTHER; note = adenosine-3'-phosphate
  modified_base 18: mod_base = OTHER; note = adenosine-3'-phosphate
  modified_base 19: mod_base = OTHER; note = guanosine-3'-phosphate
  misc_feature 1..19: note = RNA
  misc_feature 20..21: note = DNA
tatggtcgtgtgaggaaagtt

SEQ ID NO: 458 - DNA, 21 bp, synthetic construct
  source 1..21: mol_type = other DNA
  modified_base 1: mod_base = OTHER; note = uridine-3'-phosphate
  modified_base 2: mod_base = OTHER; note = guanosine-3'-phosphate
  modified_base 3: mod_base = OTHER; note = adenosine-3'-phosphate
  modified_base 4: mod_base = OTHER; note = guanosine-3'-phosphate
  modified_base 5: mod_base = OTHER; note = guanosine-3'-phosphate
  modified_base 6: mod_base = OTHER; note = adenosine-3'-phosphate
  modified_base 7: mod_base = OTHER; note = adenosine-3'-phosphate
  modified_base 8: mod_base = OTHER; note = adenosine-3'-phosphate
  modified_base 9: mod_base = OTHER; note = guanosine-3'-phosphate
  modified_base 10: mod_base = OTHER; note = guanosine-3'-phosphate
  modified_base 11: mod_base = OTHER; note = guanosine-3'-phosphate
  modified_base 12: mod_base = OTHER; note = guanosine-3'-phosphate
  modified_base 13: mod_base = OTHER; note = cytidine-3'-phosphate
  modified_base 14: mod_base = OTHER; note = uridine-3'-phosphate
  modified_base 15: mod_base = OTHER; note = guanosine-3'-phosphate
  modified_base 16: mod_base = OTHER; note = uridine-3'-phosphate
  modified_base 17: mod_base = OTHER; note = guanosine-3'-phosphate
  modified_base 18: mod_base = OTHER; note = cytidine-3'-phosphate
  modified_base 19: mod_base = OTHER; note = uridine-3'-phosphate
  misc_feature 1..19: note = RNA
  misc_feature 20..21: note = DNA
tgaggaaaggggctgtgcttt

SEQ ID NO: 459 - DNA, 21 bp, synthetic construct
  source 1..21: mol_type = other DNA
  modified_base 1: mod_base = OTHER; note = cytidine-3'-phosphate
  modified_base 2: mod_base = OTHER; note = uridine-3'-phosphate
  modified_base 3: mod_base = OTHER; note = guanosine-3'-phosphate
  modified_base 4: mod_base = OTHER; note = uridine-3'-phosphate
  modified_base 5: mod_base = OTHER; note = guanosine-3'-phosphate
  modified_base 6: mod_base = OTHER; note = cytidine-3'-phosphate
  modified_base 7: mod_base = OTHER; note = cytidine-3'-phosphate
  modified_base 8: mod_base = OTHER; note = uridine-3'-phosphate
  modified_base 9: mod_base = OTHER; note = guanosine-3'-phosphate
  modified_base 10: mod_base = OTHER; note = guanosine-3'-phosphate
  modified_base 11: mod_base = OTHER; note = guanosine-3'-phosphate
  modified_base 12: mod_base = OTHER; note = cytidine-3'-phosphate
  modified_base 13: mod_base = OTHER; note = uridine-3'-phosphate
  modified_base 14: mod_base = OTHER; note = guanosine-3'-phosphate
  modified_base 15: mod_base = OTHER; note = adenosine-3'-phosphate
  modified_base 16: mod_base = OTHER; note = guanosine-3'-phosphate
  modified_base 17: mod_base = OTHER; note = guanosine-3'-phosphate
  modified_base 18: mod_base = OTHER; note = adenosine-3'-phosphate
  modified_base 19: mod_base = OTHER; note = guanosine-3'-phosphate
  misc_feature 1..19: note = RNA
  misc_feature 20..21: note = DNA
ctgtgcctgggctgaggagtt

SEQ ID NO: 460 - DNA, 21 bp, synthetic construct
  source 1..21: mol_type = other DNA
  modified_base 1: mod_base = OTHER; note = uridine-3'-phosphate
  modified_base 2: mod_base = OTHER; note = guanosine-3'-phosphate
  modified_base 3: mod_base = OTHER; note = adenosine-3'-phosphate
  modified_base 4: mod_base = OTHER; note = guanosine-3'-phosphate
  modified_base 5: mod_base = OTHER; note = guanosine-3'-phosphate
  modified_base 6: mod_base = OTHER; note = adenosine-3'-phosphate
  modified_base 7: mod_base = OTHER; note = guanosine-3'-phosphate
  modified_base 8: mod_base = OTHER; note = guanosine-3'-phosphate
  modified_base 9: mod_base = OTHER; note = guanosine-3'-phosphate
  modified_base 10: mod_base = OTHER; note = cytidine-3'-phosphate
  modified_base 11: mod_base = OTHER; note = guanosine-3'-phosphate
  modified_base 12: mod_base = OTHER; note = cytidine-3'-phosphate
  modified_base 13: mod_base = OTHER; note = cytidine-3'-phosphate
  modified_base 14: mod_base = OTHER; note = guanosine-3'-phosphate
  modified_base 15: mod_base = OTHER; note = adenosine-3'-phosphate
  modified_base 16: mod_base = OTHER; note = cytidine-3'-phosphate
  modified_base 17: mod_base = OTHER; note = guanosine-3'-phosphate
  modified_base 18: mod_base = OTHER; note = cytidine-3'-phosphate
  modified_base 19: mod_base = OTHER; note = cytidine-3'-phosphate
  misc_feature 1..19: note = RNA
  misc_feature 20..21: note = DNA
tgaggagggcgccgacgcctt

SEQ ID NO: 461 - DNA, 21 bp, synthetic construct
  source 1..21: mol_type = other DNA
  modified_base 1: mod_base = OTHER; note = cytidine-3'-phosphate
  modified_base 2: mod_base = OTHER; note = cytidine-3'-phosphate
  modified_base 3: mod_base = OTHER; note = guanosine-3'-phosphate
  modified_base 4: mod_base = OTHER; note = adenosine-3'-phosphate
  modified_base 5: mod_base = OTHER; note = cytidine-3'-phosphate
  modified_base 6: mod_base = OTHER; note = guanosine-3'-phosphate
  modified_base 7: mod_base = OTHER; note = cytidine-3'-phosphate
  modified_base 8: mod_base = OTHER; note = cytidine-3'-phosphate
  modified_base 9: mod_base = OTHER; note = cytidine-3'-phosphate
  modified_base 10: mod_base = OTHER; note = uridine-3'-phosphate
  modified_base 11: mod_base = OTHER; note = guanosine-3'-phosphate
  modified_base 12: mod_base = OTHER; note = guanosine-3'-phosphate
  modified_base 13: mod_base = OTHER; note = guanosine-3'-phosphate
  modified_base 14: mod_base = OTHER; note = cytidine-3'-phosphate
  modified_base 15: mod_base = OTHER; note = cytidine-3'-phosphate
  modified_base 16: mod_base = OTHER; note = cytidine-3'-phosphate
  modified_base 17: mod_base = OTHER; note = uridine-3'-phosphate
  modified_base 18: mod_base = OTHER; note = guanosine-3'-phosphate
  modified_base 19: mod_base = OTHER; note = adenosine-3'-phosphate
  misc_feature 1..19: note = RNA
  misc_feature 20..21: note = DNA
ccgacgccctgggccctgatt

SEQ ID NO: 462 - DNA, 21 bp, synthetic construct
  source 1..21: mol_type = other DNA
  modified_base 1: mod_base = OTHER; note = uridine-3'-phosphate
  modified_base 2: mod_base = OTHER; note = guanosine-3'-phosphate
  modified_base 3: mod_base = OTHER; note = guanosine-3'-phosphate
  modified_base 4: mod_base = OTHER; note = guanosine-3'-phosphate
  modified_base 5: mod_base = OTHER; note = cytidine-3'-phosphate
  modified_base 6: mod_base = OTHER; note = cytidine-3'-phosphate
  modified_base 7: mod_base = OTHER; note = cytidine-3'-phosphate
  modified_base 8: mod_base = OTHER; note = uridine-3'-phosphate
  modified_base 9: mod_base = OTHER; note = guanosine-3'-phosphate
  modified_base 10: mod_base = OTHER; note = adenosine-3'-phosphate
  modified_base 11: mod_base = OTHER; note = uridine-3'-phosphate
  modified_base 12: mod_base = OTHER; note = guanosine-3'-phosphate
  modified_base 13: mod_base = OTHER; note = guanosine-3'-phosphate
  modified_base 14: mod_base = OTHER; note = cytidine-3'-phosphate
  modified_base 15: mod_base = OTHER; note = adenosine-3'-phosphate
  modified_base 16: mod_base = OTHER; note = adenosine-3'-phosphate
  modified_base 17: mod_base = OTHER; note = adenosine-3'-phosphate
  modified_base 18: mod_base = OTHER; note = uridine-3'-phosphate
  modified_base 19: mod_base = OTHER; note = uridine-3'-phosphate
  misc_feature 1..19: note = RNA
  misc_feature 20..21: note = DNA
tgggccctgatggcaaatttt

SEQ ID NO: 463 - DNA, 21 bp, synthetic construct
  source 1..21: mol_type = other DNA
  modified_base 1: mod_base = OTHER; note = cytidine-3'-phosphate
  modified_base 2: mod_base = OTHER; note = adenosine-3'-phosphate
  modified_base 3: mod_base = OTHER; note = adenosine-3'-phosphate
  modified_base 4: mod_base = OTHER; note = adenosine-3'-phosphate
  modified_base 5: mod_base = OTHER; note = uridine-3'-phosphate
  modified_base 6: mod_base = OTHER; note = uridine-3'-phosphate
  modified_base 7: mod_base = OTHER; note = guanosine-3'-phosphate
  modified_base 8: mod_base = OTHER; note = cytidine-3'-phosphate
  modified_base 9: mod_base = OTHER; note = uridine-3'-phosphate
  modified_base 10: mod_base = OTHER; note = cytidine-3'-phosphate
  modified_base 11: mod_base = OTHER; note = cytidine-3'-phosphate
  modified_base 12: mod_base = OTHER; note = adenosine-3'-phosphate
  modified_base 13: mod_base = OTHER; note = cytidine-3'-phosphate
  modified_base 14: mod_base = OTHER; note = uridine-3'-phosphate
  modified_base 15: mod_base = OTHER; note = cytidine-3'-phosphate
  modified_base 16: mod_base = OTHER; note = guanosine-3'-phosphate
  modified_base 17: mod_base = OTHER; note = guanosine-3'-phosphate
  modified_base 18: mod_base = OTHER; note = adenosine-3'-phosphate
  modified_base 19: mod_base = OTHER; note = uridine-3'-phosphate
  misc_feature 1..19: note = RNA
  misc_feature 20..21: note = DNA
caaattgctccactcggattt

SEQ ID NO: 464 - DNA, 21 bp, synthetic construct
  source 1..21: mol_type = other DNA
  modified_base 1: mod_base = OTHER; note = adenosine-3'-phosphate
  modified_base 2: mod_base = OTHER; note = cytidine-3'-phosphate
  modified_base 3: mod_base = OTHER; note = uridine-3'-phosphate
  modified_base 4: mod_base = OTHER; note = cytidine-3'-phosphate
  modified_base 5: mod_base = OTHER; note = guanosine-3'-phosphate
  modified_base 6: mod_base = OTHER; note = guanosine-3'-phosphate
  modified_base 7: mod_base = OTHER; note = adenosine-3'-phosphate
  modified_base 8: mod_base = OTHER; note = uridine-3'-phosphate
  modified_base 9: mod_base = OTHER; note = guanosine-3'-phosphate
  modified_base 10: mod_base = OTHER; note = cytidine-3'-phosphate
  modified_base 11: mod_base = OTHER; note = uridine-3'-phosphate
  modified_base 12: mod_base = OTHER; note = uridine-3'-phosphate
  modified_base 13: mod_base = OTHER; note = uridine-3'-phosphate
  modified_base 14: mod_base = OTHER; note = cytidine-3'-phosphate
  modified_base 15: mod_base = OTHER; note = cytidine-3'-phosphate
  modified_base 16: mod_base = OTHER; note = cytidine-3'-phosphate
  modified_base 17: mod_base = OTHER; note = guanosine-3'-phosphate
  modified_base 18: mod_base = OTHER; note = cytidine-3'-phosphate
  modified_base 19: mod_base = OTHER; note = cytidine-3'-phosphate
  misc_feature 1..19: note = RNA
  misc_feature 20..21: note = DNA
actcggatgctttcccgcctt

SEQ ID NO: 465 - DNA, 21 bp, synthetic construct
  source 1..21: mol_type = other DNA
  modified_base 1: mod_base = OTHER; note = uridine-3'-phosphate
  modified_base 2: mod_base = OTHER; note = uridine-3'-phosphate
  modified_base 3: mod_base = OTHER; note = uridine-3'-phosphate
  modified_base 4: mod_base = OTHER; note = cytidine-3'-phosphate
  modified_base 5: mod_base = OTHER; note = cytidine-3'-phosphate
  modified_base 6: mod_base = OTHER; note = cytidine-3'-phosphate
  modified_base 7: mod_base = OTHER; note = guanosine-3'-phosphate
  modified_base 8: mod_base = OTHER; note = cytidine-3'-phosphate
  modified_base 9: mod_base = OTHER; note = cytidine-3'-phosphate
  modified_base 10: mod_base = OTHER; note = adenosine-3'-phosphate
  modified_base 11: mod_base = OTHER; note = cytidine-3'-phosphate
  modified_base 12: mod_base = OTHER; note = cytidine-3'-phosphate
  modified_base 13: mod_base = OTHER; note = cytidine-3'-phosphate
  modified_base 14: mod_base = OTHER; note = cytidine-3'-phosphate
  modified_base 15: mod_base = OTHER; note = guanosine-3'-phosphate
  modified_base 16: mod_base = OTHER; note = cytidine-3'-phosphate
  modified_base 17: mod_base = OTHER; note = guanosine-3'-phosphate
  modified_base 18: mod_base = OTHER; note = uridine-3'-phosphate
  modified_base 19: mod_base = OTHER; note = guanosine-3'-phosphate
  misc_feature 1..19: note = RNA
  misc_feature 20..21: note = DNA
tttcccgccaccccgcgtgtt

SEQ ID NO: 466 - DNA, 21 bp, synthetic construct
  source 1..21: mol_type = other DNA
  modified_base 1: mod_base = OTHER; note = cytidine-3'-phosphate
  modified_base 2: mod_base = OTHER; note = cytidine-3'-phosphate
  modified_base 3: mod_base = OTHER; note = guanosine-3'-phosphate
  modified_base 4: mod_base = OTHER; note = cytidine-3'-phosphate
  modified_base 5: mod_base = OTHER; note = guanosine-3'-phosphate
  modified_base 6: mod_base = OTHER; note = uridine-3'-phosphate
  modified_base 7: mod_base = OTHER; note = guanosine-3'-phosphate
  modified_base 8: mod_base = OTHER; note = guanosine-3'-phosphate
  modified_base 9: mod_base = OTHER; note = uridine-3'-phosphate
  modified_base 10: mod_base = OTHER; note = guanosine-3'-phosphate
  modified_base 11: mod_base = OTHER; note = guanosine-3'-phosphate
  modified_base 12: mod_base = OTHER; note = adenosine-3'-phosphate
  modified_base 13: mod_base = OTHER; note = uridine-3'-phosphate
  modified_base 14: mod_base = OTHER; note = adenosine-3'-phosphate
  modified_base 15: mod_base = OTHER; note = cytidine-3'-phosphate
  modified_base 16: mod_base = OTHER; note = adenosine-3'-phosphate
  modified_base 17: mod_base = OTHER; note = cytidine-3'-phosphate
  modified_base 18: mod_base = OTHER; note = uridine-3'-phosphate
  modified_base 19: mod_base = OTHER; note = guanosine-3'-phosphate
  misc_feature 1..19: note = RNA
  misc_feature 20..21: note = DNA
ccgcgtggtggatacactgtt

SEQ ID NO: 467 - DNA, 21 bp, synthetic construct
  source 1..21: mol_type = other DNA
  modified_base 1: mod_base = OTHER; note = adenosine-3'-phosphate
  modified_base 2: mod_base = OTHER; note = uridine-3'-phosphate
  modified_base 3: mod_base = OTHER; note = adenosine-3'-phosphate
  modified_base 4: mod_base = OTHER; note = cytidine-3'-phosphate
  modified_base 5: mod_base = OTHER; note = adenosine-3'-phosphate
  modified_base 6: mod_base = OTHER; note = cytidine-3'-phosphate
  modified_base 7: mod_base = OTHER; note = uridine-3'-phosphate
  modified_base 8: mod_base = OTHER; note = guanosine-3'-phosphate
  modified_base 9: mod_base = OTHER; note = guanosine-3'-phosphate
  modified_base 10: mod_base = OTHER; note = guanosine-3'-phosphate
  modified_base 11: mod_base = OTHER; note = adenosine-3'-phosphate
  modified_base 12: mod_base = OTHER; note = guanosine-3'-phosphate
  modified_base 13: mod_base = OTHER; note = cytidine-3'-phosphate
  modified_base 14: mod_base = OTHER; note = uridine-3'-phosphate
  modified_base 15: mod_base = OTHER; note = guanosine-3'-phosphate
  modified_base 16: mod_base = OTHER; note = guanosine-3'-phosphate
  modified_base 17: mod_base = OTHER; note = adenosine-3'-phosphate
  modified_base 18: mod_base = OTHER; note = guanosine-3'-phosphate
  modified_base 19: mod_base = OTHER; note = adenosine-3'-phosphate
  misc_feature 1..19: note = RNA
  misc_feature 20..21: note = DNA
atacactgggagctggagatt

SEQ ID NO: 468 - DNA, 21 bp, synthetic construct
  source 1..21: mol_type = other DNA
  modified_base 1: mod_base = OTHER; note = adenosine-3'-phosphate
  modified_base 2: mod_base = OTHER; note = guanosine-3'-phosphate
  modified_base 3: mod_base = OTHER; note = cytidine-3'-phosphate
  modified_base 4: mod_base = OTHER; note = uridine-3'-phosphate
  modified_base 5: mod_base = OTHER; note = guanosine-3'-phosphate
  modified_base 6: mod_base = OTHER; note = guanosine-3'-phosphate
  modified_base 7: mod_base = OTHER; note = adenosine-3'-phosphate
  modified_base 8: mod_base = OTHER; note = guanosine-3'-phosphate
  modified_base 9: mod_base = OTHER; note = adenosine-3'-phosphate
  modified_base 10: mod_base = OTHER; note = cytidine-3'-phosphate
  modified_base 11: mod_base = OTHER; note = adenosine-3'-phosphate
  modified_base 12: mod_base = OTHER; note = cytidine-3'-phosphate
  modified_base 13: mod_base = OTHER; note = cytidine-3'-phosphate
  modified_base 14: mod_base = OTHER; note = uridine-3'-phosphate
  modified_base 15: mod_base = OTHER; note = uridine-3'-phosphate
  modified_base 16: mod_base = OTHER; note = cytidine-3'-phosphate
  modified_base 17: mod_base = OTHER; note = adenosine-3'-phosphate
  modified_base 18: mod_base = OTHER; note = adenosine-3'-phosphate
  modified_base 19: mod_base = OTHER; note = uridine-3'-phosphate
  misc_feature 1..19: note = RNA
  misc_feature 20..21: note = DNA
agctggagacaccttcaattt

SEQ ID NO: 469 - DNA, 21 bp, synthetic construct
  source 1..21: mol_type = other DNA
  modified_base 1: mod_base = OTHER; note = adenosine-3'-phosphate
  modified_base 2: mod_base = OTHER; note = cytidine-3'-phosphate
  modified_base 3: mod_base = OTHER; note = cytidine-3'-phosphate
  modified_base 4: mod_base = OTHER; note = uridine-3'-phosphate
  modified_base 5: mod_base = OTHER; note = uridine-3'-phosphate
  modified_base 6: mod_base = OTHER; note = cytidine-3'-phosphate
  modified_base 7: mod_base = OTHER; note = adenosine-3'-phosphate
  modified_base 8: mod_base = OTHER; note = adenosine-3'-phosphate
  modified_base 9: mod_base = OTHER; note = uridine-3'-phosphate
  modified_base 10: mod_base = OTHER; note = guanosine-3'-phosphate
  modified_base 11: mod_base = OTHER; note = cytidine-3'-phosphate
  modified_base 12: mod_base = OTHER; note = cytidine-3'-phosphate
  modified_base 13: mod_base = OTHER; note = uridine-3'-phosphate
  modified_base 14: mod_base = OTHER; note = cytidine-3'-phosphate
  modified_base 15: mod_base = OTHER; note = cytidine-3'-phosphate
  modified_base 16: mod_base = OTHER; note = guanosine-3'-phosphate
  modified_base 17: mod_base = OTHER; note = uridine-3'-phosphate
  modified_base 18: mod_base = OTHER; note = cytidine-3'-phosphate
  modified_base 19: mod_base = OTHER; note = adenosine-3'-phosphate
  misc_feature 1..19: note = RNA
  misc_feature 20..21: note = DNA
accttcaatgcctccgtcatt

SEQ ID NO: 470 - DNA, 21 bp, synthetic construct
  source 1..21: mol_type = other DNA
  modified_base 1: mod_base = OTHER; note = uridine-3'-phosphate
  modified_base 2: mod_base = OTHER; note = cytidine-3'-phosphate
  modified_base 3: mod_base = OTHER; note = cytidine-3'-phosphate
  modified_base 4: mod_base = OTHER; note = guanosine-3'-phosphate
  modified_base 5: mod_base = OTHER; note = uridine-3'-phosphate
  modified_base 6: mod_base = OTHER; note = cytidine-3'-phosphate
  modified_base 7: mod_base = OTHER; note = adenosine-3'-phosphate
  modified_base 8: mod_base = OTHER; note = uridine-3'-phosphate
  modified_base 9: mod_base = OTHER; note = cytidine-3'-phosphate
  modified_base 10: mod_base = OTHER; note = uridine-3'-phosphate
  modified_base 11: mod_base = OTHER; note = uridine-3'-phosphate
  modified_base 12: mod_base = OTHER; note = cytidine-3'-phosphate
  modified_base 13: mod_base = OTHER; note = adenosine-3'-phosphate
  modified_base 14: mod_base = OTHER; note = guanosine-3'-phosphate
  modified_base 15: mod_base = OTHER; note = cytidine-3'-phosphate
  modified_base 16: mod_base = OTHER; note = cytidine-3'-phosphate
  modified_base 17: mod_base = OTHER; note = uridine-3'-phosphate
  modified_base 18: mod_base = OTHER; note = cytidine-3'-phosphate
  modified_base 19: mod_base = OTHER; note = uridine-3'-phosphate
  misc_feature 1..19: note = RNA
  misc_feature 20..21: note = DNA
tccgtcatcttcagcctcttt

SEQ ID NO: 471 - DNA, 21 bp, synthetic construct
  source 1..21: mol_type = other DNA
  modified_base 1: mod_base = OTHER; note = adenosine-3'-phosphate
  modified_base 2: mod_base = OTHER; note = guanosine-3'-phosphate
  modified_base 3: mod_base = OTHER; note = cytidine-3'-phosphate
  modified_base 4: mod_base = OTHER; note = cytidine-3'-phosphate
  modified_base 5: mod_base = OTHER; note = uridine-3'-phosphate
  modified_base 6: mod_base = OTHER; note = cytidine-3'-phosphate
  modified_base 7: mod_base = OTHER; note = uridine-3'-phosphate
  modified_base 8: mod_base = OTHER; note = cytidine-3'-phosphate
  modified_base 9: mod_base = OTHER; note = cytidine-3'-phosphate
  modified_base 10: mod_base = OTHER; note = cytidine-3'-phosphate
  modified_base 11: mod_base = OTHER; note = adenosine-3'-phosphate
  modified_base 12: mod_base = OTHER; note = guanosine-3'-phosphate
  modified_base 13: mod_base = OTHER; note = guanosine-3'-phosphate
  modified_base 14: mod_base = OTHER; note = guanosine-3'-phosphate
  modified_base 15: mod_base = OTHER; note = guanosine-3'-phosphate
  modified_base 16: mod_base = OTHER; note = adenosine-3'-phosphate
  modified_base 17: mod_base = OTHER; note = guanosine-3'-phosphate
  modified_base 18: mod_base = OTHER; note = guanosine-3'-phosphate
  modified_base 19: mod_base = OTHER; note = adenosine-3'-phosphate
  misc_feature 1..19: note = RNA
  misc_feature 20..21: note = DNA
agcctctcccaggggaggatt

SEQ ID NO: 472 - DNA, 21 bp, synthetic construct
  source 1..21: mol_type = other DNA
  modified_base 1: mod_base = OTHER; note = uridine-3'-phosphate
  modified_base 2: mod_base = OTHER; note = guanosine-3'-phosphate
  modified_base 3: mod_base = OTHER; note = cytidine-3'-phosphate
  modified_base 4: mod_base = OTHER; note = adenosine-3'-phosphate
  modified_base 5: mod_base = OTHER; note = guanosine-3'-phosphate
  modified_base 6: mod_base = OTHER; note = guanosine-3'-phosphate
  modified_base 7: mod_base = OTHER; note = adenosine-3'-phosphate
  modified_base 8: mod_base = OTHER; note = adenosine-3'-phosphate
  modified_base 9: mod_base = OTHER; note = guanosine-3'-phosphate
  modified_base 10: mod_base = OTHER; note = cytidine-3'-phosphate
  modified_base 11: mod_base = OTHER; note = adenosine-3'-phosphate
  modified_base 12: mod_base = OTHER; note = cytidine-3'-phosphate
  modified_base 13: mod_base = OTHER; note = uridine-3'-phosphate
  modified_base 14: mod_base = OTHER; note = guanosine-3'-phosphate
  modified_base 15: mod_base = OTHER; note = adenosine-3'-phosphate
  modified_base 16: mod_base = OTHER; note = guanosine-3'-phosphate
  modified_base 17: mod_base = OTHER; note = adenosine-3'-phosphate
  modified_base 18: mod_base = OTHER; note = uridine-3'-phosphate
  modified_base 19: mod_base = OTHER; note = uridine-3'-phosphate
  misc_feature 1..19: note = RNA
  misc_feature 20..21: note = DNA
tgcaggaagcactgagatttt

SEQ ID NO: 473 - DNA, 21 bp, synthetic construct
  source 1..21: mol_type = other DNA
  modified_base 1: mod_base = OTHER; note = cytidine-3'-phosphate
  modified_base 2: mod_base = OTHER; note = uridine-3'-phosphate
  modified_base 3: mod_base = OTHER; note = guanosine-3'-phosphate
  modified_base 4: mod_base = OTHER; note = adenosine-3'-phosphate
  modified_base 5: mod_base = OTHER; note = guanosine-3'-phosphate
  modified_base 6: mod_base = OTHER; note = adenosine-3'-phosphate
  modified_base 7: mod_base = OTHER; note = uridine-3'-phosphate
  modified_base 8: mod_base = OTHER; note = uridine-3'-phosphate
  modified_base 9: mod_base = OTHER; note = cytidine-3'-phosphate
  modified_base 10: mod_base = OTHER; note = guanosine-3'-phosphate
  modified_base 11: mod_base = OTHER; note = guanosine-3'-phosphate
  modified_base 12: mod_base = OTHER; note = guanosine-3'-phosphate
  modified_base 13: mod_base = OTHER; note = uridine-3'-phosphate
  modified_base 14: mod_base = OTHER; note = guanosine-3'-phosphate
  modified_base 15: mod_base = OTHER; note = cytidine-3'-phosphate
  modified_base 16: mod_base = OTHER; note = cytidine-3'-phosphate
  modified_base 17: mod_base = OTHER; note = adenosine-3'-phosphate
  modified_base 18: mod_base = OTHER; note = guanosine-3'-phosphate
  modified_base 19: mod_base = OTHER; note = guanosine-3'-phosphate
  misc_feature 1..19: note = RNA
  misc_feature 20..21: note = DNA
ctgagattcgggtgccaggtt

SEQ ID NO: 474 - DNA, 21 bp, synthetic construct
  source 1..21: mol_type = other DNA
  modified_base 1: mod_base = OTHER; note = guanosine-3'-phosphate
  modified_base 2: mod_base = OTHER; note = guanosine-3'-phosphate
  modified_base 3: mod_base = OTHER; note = uridine-3'-phosphate
  modified_base 4: mod_base = OTHER; note = guanosine-3'-phosphate
  modified_base 5: mod_base = OTHER; note = cytidine-3'-phosphate
  modified_base 6: mod_base = OTHER; note = cytidine-3'-phosphate
  modified_base 7: mod_base = OTHER; note = adenosine-3'-phosphate
  modified_base 8: mod_base = OTHER; note = guanosine-3'-phosphate
  modified_base 9: mod_base = OTHER; note = guanosine-3'-phosphate
  modified_base 10: mod_base = OTHER; note = uridine-3'-phosphate
  modified_base 11: mod_base = OTHER; note = guanosine-3'-phosphate
  modified_base 12: mod_base = OTHER; note = guanosine-3'-phosphate
  modified_base 13: mod_base = OTHER; note = cytidine-3'-phosphate
  modified_base 14: mod_base = OTHER; note = cytidine-3'-phosphate
  modified_base 15: mod_base = OTHER; note = guanosine-3'-phosphate
  modified_base 16: mod_base = OTHER; note = guanosine-3'-phosphate
  modified_base 17: mod_base = OTHER; note = cytidine-3'-phosphate
  modified_base 18: mod_base = OTHER; note = adenosine-3'-phosphate
  modified_base 19: mod_base = OTHER; note = adenosine-3'-phosphate
  misc_feature 1..19: note = RNA
  misc_feature 20..21: note = DNA
ggtgccaggtggccggcaatt

SEQ ID NO: 475 - DNA, 21 bp, synthetic construct
  source 1..21: mol_type = other DNA
  modified_base 1: mod_base = OTHER; note = adenosine-3'-phosphate
  modified_base 2: mod_base = OTHER; note = guanosine-3'-phosphate
  modified_base 3: mod_base = OTHER; note = uridine-3'-phosphate
  modified_base 4: mod_base = OTHER; note = guanosine-3'-phosphate
  modified_base 5: mod_base = OTHER; note = uridine-3'-phosphate
  modified_base 6: mod_base = OTHER; note = guanosine-3'-phosphate
  modified_base 7: mod_base = OTHER; note = guanosine-3'-phosphate
  modified_base 8: mod_base = OTHER; note = cytidine-3'-phosphate
  modified_base 9: mod_base = OTHER; note = cytidine-3'-phosphate
  modified_base 10: mod_base = OTHER; note = uridine-3'-phosphate
  modified_base 11: mod_base = OTHER; note = guanosine-3'-phosphate
  modified_base 12: mod_base = OTHER; note = cytidine-3'-phosphate
  modified_base 13: mod_base = OTHER; note = adenosine-3'-phosphate
  modified_base 14: mod_base = OTHER; note = guanosine-3'-phosphate
  modified_base 15: mod_base = OTHER; note = guanosine-3'-phosphate
  modified_base 16: mod_base = OTHER; note = guanosine-3'-phosphate
  modified_base 17: mod_base = OTHER; note = cytidine-3'-phosphate
  modified_base 18: mod_base = OTHER; note = uridine-3'-phosphate
  modified_base 19: mod_base = OTHER; note = uridine-3'-phosphate
  misc_feature 1..19: note = RNA
  misc_feature 20..21: note = DNA
agtgtggcctgcagggctttt

SEQ ID NO: 476 - DNA, 21 bp, synthetic construct
  source 1..21: mol_type = other DNA
  modified_base 1: mod_base = OTHER; note = cytidine-3'-phosphate
  modified_base 2: mod_base = OTHER; note = adenosine-3'-phosphate
  modified_base 3: mod_base = OTHER; note = guanosine-3'-phosphate
  modified_base 4: mod_base = OTHER; note = guanosine-3'-phosphate
  modified_base 5: mod_base = OTHER; note = guanosine-3'-phosphate
  modified_base 6: mod_base = OTHER; note = cytidine-3'-phosphate
  modified_base 7: mod_base = OTHER; note = uridine-3'-phosphate
  modified_base 8: mod_base = OTHER; note = uridine-3'-phosphate
  modified_base 9: mod_base = OTHER; note = uridine-3'-phosphate
  modified_base 10: mod_base = OTHER; note = guanosine-3'-phosphate
  modified_base 11: mod_base = OTHER; note = adenosine-3'-phosphate
  modified_base 12: mod_base = OTHER; note = uridine-3'-phosphate
  modified_base 13: mod_base = OTHER; note = guanosine-3'-phosphate
  modified_base 14: mod_base = OTHER; note = guanosine-3'-phosphate
  modified_base 15: mod_base = OTHER; note = cytidine-3'-phosphate
  modified_base 16: mod_base = OTHER; note = adenosine-3'-phosphate
  modified_base 17: mod_base = OTHER; note = uridine-3'-phosphate
  modified_base 18: mod_base = OTHER; note = cytidine-3'-phosphate
  modified_base 19: mod_base = OTHER; note = guanosine-3'-phosphate
  misc_feature 1..19: note = RNA
  misc_feature 20..21: note = DNA
cagggctttgatggcatcgtt

SEQ ID NO: 477 - DNA, 21 bp, synthetic construct
  source 1..21: mol_type = other DNA
  modified_base 1: mod_base = OTHER; note = guanosine-3'-phosphate
  modified_base 2: mod_base = OTHER; note = cytidine-3'-phosphate
  modified_base 3: mod_base = OTHER; note = adenosine-3'-phosphate
  modified_base 4: mod_base = OTHER; note = uridine-3'-phosphate
  modified_base 5: mod_base = OTHER; note = cytidine-3'-phosphate
  modified_base 6: mod_base = OTHER; note = guanosine-3'-phosphate
  modified_base 7: mod_base = OTHER; note = uridine-3'-phosphate
  modified_base 8: mod_base = OTHER; note = guanosine-3'-phosphate
  modified_base 9: mod_base = OTHER; note = uridine-3'-phosphate
  modified_base 10: mod_base = OTHER; note = guanosine-3'-phosphate
  modified_base 11: mod_base = OTHER; note = adenosine-3'-phosphate
  modified_base 12: mod_base = OTHER; note = guanosine-3'-phosphate
  modified_base 13: mod_base = OTHER; note = adenosine-3'-phosphate
  modified_base 14: mod_base = OTHER; note = guanosine-3'-phosphate
  modified_base 15: mod_base = OTHER; note = cytidine-3'-phosphate
  modified_base 16: mod_base = OTHER; note = adenosine-3'-phosphate
  modified_base 17: mod_base = OTHER; note = guanosine-3'-phosphate
  modified_base 18: mod_base = OTHER; note = guanosine-3'-phosphate
  modified_base 19: mod_base = OTHER; note = uridine-3'-phosphate
  misc_feature 1..19: note = RNA
  misc_feature 20..21: note = DNA
gcatcgtgtgagagcaggttt

SEQ ID NO: 478 - DNA, 21 bp, synthetic construct
  source 1..21: mol_type = other DNA
  modified_base 1: mod_base = OTHER; note = adenosine-3'-phosphate
  modified_base 2: mod_base = OTHER; note = guanosine-3'-phosphate
  modified_base 3: mod_base = OTHER; note = adenosine-3'-phosphate
  modified_base 4: mod_base = OTHER; note = guanosine-3'-phosphate
  modified_base 5: mod_base = OTHER; note = cytidine-3'-phosphate
  modified_base 6: mod_base = OTHER; note = adenosine-3'-phosphate
  modified_base 7: mod_base = OTHER; note = guanosine-3'-phosphate
  modified_base 8: mod_base = OTHER; note = guanosine-3'-phosphate
  modified_base 9: mod_base = OTHER; note = uridine-3'-phosphate
  modified_base 10: mod_base = OTHER; note = guanosine-3'-phosphate
  modified_base 11: mod_base = OTHER; note = cytidine-3'-phosphate
  modified_base 12: mod_base = OTHER; note = cytidine-3'-phosphate
  modified_base 13: mod_base = OTHER; note = guanosine-3'-phosphate
  modified_base 14: mod_base = OTHER; note = guanosine-3'-phosphate
  modified_base 15: mod_base = OTHER; note = cytidine-3'-phosphate
  modified_base 16: mod_base = OTHER; note = uridine-3'-phosphate
  modified_base 17: mod_base = OTHER; note = cytidine-3'-phosphate
  modified_base 18: mod_base = OTHER; note = cytidine-3'-phosphate
  modified_base 19: mod_base = OTHER; note = uridine-3'-phosphate
  misc_feature 1..19: note = RNA
  misc_feature 20..21: note = DNA
agagcaggtgccggctccttt

SEQ ID NO: 479 - DNA, 21 bp, synthetic construct
  source 1..21: mol_type = other DNA
  modified_base 1: mod_base = OTHER; note = cytidine-3'-phosphate
  modified_base 2: mod_base = OTHER; note = cytidine-3'-phosphate
  modified_base 3: mod_base = OTHER; note = guanosine-3'-phosphate
  modified_base 4: mod_base = OTHER; note = guanosine-3'-phosphate
  modified_base 5: mod_base = OTHER; note = cytidine-3'-phosphate
  modified_base 6: mod_base = OTHER; note = uridine-3'-phosphate
  modified_base 7: mod_base = OTHER; note = cytidine-3'-phosphate
  modified_base 8: mod_base = OTHER; note = cytidine-3'-phosphate
  modified_base 9: mod_base = OTHER; note = uridine-3'-phosphate
  modified_base 10: mod_base = OTHER; note = cytidine-3'-phosphate
  modified_base 11: mod_base = OTHER; note = adenosine-3'-phosphate
  modified_base 12: mod_base = OTHER; note = cytidine-3'-phosphate
  modified_base 13: mod_base = OTHER; note = adenosine-3'-phosphate
  modified_base 14: mod_base = OTHER; note = cytidine-3'-phosphate
  modified_base 15: mod_base = OTHER; note = adenosine-3'-phosphate
  modified_base 16: mod_base = OTHER; note = cytidine-3'-phosphate
  modified_base 17: mod_base = OTHER; note = cytidine-3'-phosphate
  modified_base 18: mod_base = OTHER; note = adenosine-3'-phosphate
  modified_base 19: mod_base = OTHER; note = uridine-3'-phosphate
  misc_feature 1..19: note = RNA
  misc_feature 20..21: note = DNA
ccggctcctcacacaccattt

SEQ ID NO: 480 - DNA, 21 bp, synthetic construct
  source 1..21: mol_type = other DNA
  modified_base 1: mod_base = OTHER; note = cytidine-3'-phosphate
  modified_base 2: mod_base = OTHER; note = adenosine-3'-phosphate
  modified_base 3: mod_base = OTHER; note = cytidine-3'-phosphate
  modified_base 4: mod_base = OTHER; note = adenosine-3'-phosphate
  modified_base 5: mod_base = OTHER; note = cytidine-3'-phosphate
  modified_base 6: mod_base = OTHER; note = cytidine-3'-phosphate
  modified_base 7: mod_base = OTHER; note = adenosine-3'-phosphate
  modified_base 8: mod_base = OTHER; note = uridine-3'-phosphate
  modified_base 9: mod_base = OTHER; note = guanosine-3'-phosphate
  modified_base 10: mod_base = OTHER; note = guanosine-3'-phosphate
  modified_base 11: mod_base = OTHER; note = adenosine-3'-phosphate
  modified_base 12: mod_base = OTHER; note = guanosine-3'-phosphate
  modified_base 13: mod_base = OTHER; note = adenosine-3'-phosphate
  modified_base 14: mod_base = OTHER; note = cytidine-3'-phosphate
  modified_base 15: mod_base = OTHER; note = uridine-3'-phosphate
  modified_base 16: mod_base = OTHER; note = adenosine-3'-phosphate
  modified_base 17: mod_base = OTHER; note = cytidine-3'-phosphate
  modified_base 18: mod_base = OTHER; note = cytidine-3'-phosphate
  modified_base 19: mod_base = OTHER; note = adenosine-3'-phosphate
  misc_feature 1..19: note = RNA
  misc_feature 20..21: note = DNA
cacaccatggagactaccatt

SEQ ID NO: 481 - DNA, 21 bp, synthetic construct
  source 1..21: mol_type = other DNA
  modified_base 1: mod_base = OTHER; note = adenosine-3'-phosphate
  modified_base 2: mod_base = OTHER; note = cytidine-3'-phosphate
  modified_base 3: mod_base = OTHER; note = uridine-3'-phosphate
  modified_base 4: mod_base = OTHER; note = adenosine-3'-phosphate
  modified_base 5: mod_base = OTHER; note = cytidine-3'-phosphate
  modified_base 6: mod_base = OTHER; note = cytidine-3'-phosphate
  modified_base 7: mod_base = OTHER; note = adenosine-3'-phosphate
  modified_base 8: mod_base = OTHER; note = uridine-3'-phosphate
  modified_base 9: mod_base = OTHER; note = uridine-3'-phosphate
  modified_base 10: mod_base = OTHER; note = guanosine-3'-phosphate
  modified_base 11: mod_base = OTHER; note = cytidine-3'-phosphate
  modified_base 12: mod_base = OTHER; note = guanosine-3'-phosphate
  modified_base 13: mod_base = OTHER; note = guanosine-3'-phosphate
  modified_base 14: mod_base = OTHER; note = cytidine-3'-phosphate
  modified_base 15: mod_base = OTHER; note = uridine-3'-phosphate
  modified_base 16: mod_base = OTHER; note = guanosine-3'-phosphate
  modified_base 17: mod_base = OTHER; note = cytidine-3'-phosphate
  modified_base 18: mod_base = OTHER; note = adenosine-3'-phosphate
  modified_base 19: mod_base = OTHER; note = uridine-3'-phosphate
  misc_feature 1..19: note = RNA
  misc_feature 20..21: note = DNA
actaccattgcggctgcattt

SEQ ID NO: 482 - DNA, 21 bp, synthetic construct
  source 1..21: mol_type = other DNA
  modified_base 1: mod_base = OTHER; note = cytidine-3'-phosphate
  modified_base 2: mod_base = OTHER; note = guanosine-3'-phosphate
  modified_base 3: mod_base = OTHER; note = guanosine-3'-phosphate
  modified_base 4: mod_base = OTHER; note = cytidine-3'-phosphate
  modified_base 5: mod_base = OTHER; note = uridine-3'-phosphate
  modified_base 6: mod_base = OTHER; note = guanosine-3'-phosphate
  modified_base 7: mod_base = OTHER; note = cytidine-3'-phosphate
  modified_base 8: mod_base = OTHER; note = adenosine-3'-phosphate
  modified_base 9: mod_base = OTHER; note = uridine-3'-phosphate
  modified_base 10: mod_base = OTHER; note = cytidine-3'-phosphate
  modified_base 11: mod_base = OTHER; note = guanosine-3'-phosphate
  modified_base 12: mod_base = OTHER; note = cytidine-3'-phosphate
  modified_base 13: mod_base = OTHER; note = cytidine-3'-phosphate
  modified_base 14: mod_base = OTHER; note = uridine-3'-phosphate
  modified_base 15: mod_base = OTHER; note = uridine-3'-phosphate
  modified_base 16: mod_base = OTHER; note = cytidine-3'-phosphate
  modified_base 17: mod_base = OTHER; note = uridine-3'-phosphate
  modified_base 18: mod_base = OTHER; note = cytidine-3'-phosphate
  modified_base 19: mod_base = OTHER; note = cytidine-3'-phosphate
  misc_feature 1..19: note = RNA
  misc_feature 20..21: note = DNA
cggctgcatcgccttctcctt

SEQ ID NO: 483 - DNA, 21 bp, synthetic construct
  source 1..21: mol_type = other DNA
  modified_base 1: mod_base = OTHER; note = uridine-3'-phosphate
  modified_base 2: mod_base = OTHER; note = uridine-3'-phosphate
  modified_base 3: mod_base = OTHER; note = cytidine-3'-phosphate
  modified_base 4: mod_base = OTHER; note = uridine-3'-phosphate
  modified_base 5: mod_base = OTHER; note = cytidine-3'-phosphate
  modified_base 6: mod_base = OTHER; note = cytidine-3'-phosphate
  modified_base 7: mod_base = OTHER; note = cytidine-3'-phosphate
  modified_base 8: mod_base = OTHER; note = cytidine-3'-phosphate
  modified_base 9: mod_base = OTHER; note = uridine-3'-phosphate
  modified_base 10: mod_base = OTHER; note = cytidine-3'-phosphate
  modified_base 11: mod_base = OTHER; note = cytidine-3'-phosphate
  modified_base 12: mod_base = OTHER; note = adenosine-3'-phosphate
  modified_base 13: mod_base = OTHER; note = uridine-3'-phosphate
  modified_base 14: mod_base = OTHER; note = cytidine-3'-phosphate
  modified_base 15: mod_base = OTHER; note = cytidine-3'-phosphate
  modified_base 16: mod_base = OTHER; note = adenosine-3'-phosphate
  modified_base 17: mod_base = OTHER; note = guanosine-3'-phosphate
  modified_base 18: mod_base = OTHER; note = cytidine-3'-phosphate
  modified_base 19: mod_base = OTHER; note = cytidine-3'-phosphate
  misc_feature 1..19: note = RNA
  misc_feature 20..21: note = DNA
ttctcccctccatccagcctt

SEQ ID NO: 484 - DNA, 21 bp, synthetic construct
  source 1..21: mol_type = other DNA
  modified_base 1: mod_base = OTHER; note = adenosine-3'-phosphate
  modified_base 2: mod_base = OTHER; note = uridine-3'-phosphate
  modified_base 3: mod_base = OTHER; note = cytidine-3'-phosphate
  modified_base 4: mod_base = OTHER; note = cytidine-3'-phosphate
  modified_base 5: mod_base = OTHER; note = adenosine-3'-phosphate
  modified_base 6: mod_base = OTHER; note = guanosine-3'-phosphate
  modified_base 7: mod_base = OTHER; note = cytidine-3'-phosphate
  modified_base 8: mod_base = OTHER; note = cytidine-3'-phosphate
  modified_base 9: mod_base = OTHER; note = uridine-3'-phosphate
  modified_base 10: mod_base = OTHER; note = guanosine-3'-phosphate
  modified_base 11: mod_base = OTHER; note = guanosine-3'-phosphate
  modified_base 12: mod_base = OTHER; note = cytidine-3'-phosphate
  modified_base 13: mod_base = OTHER; note = guanosine-3'-phosphate
  modified_base 14: mod_base = OTHER; note = uridine-3'-phosphate
  modified_base 15: mod_base = OTHER; note = cytidine-3'-phosphate
  modified_base 16: mod_base = OTHER; note = cytidine-3'-phosphate
  modified_base 17: mod_base = OTHER; note = adenosine-3'-phosphate
  modified_base 18: mod_base = OTHER; note = guanosine-3'-phosphate
  modified_base 19: mod_base = OTHER; note = guanosine-3'-phosphate
  misc_feature 1..19: note = RNA
  misc_feature 20..21: note = DNA
atccagcctggcgtccaggtt

SEQ ID NO: 485 - DNA, 21 bp, synthetic construct
  source 1..21: mol_type = other DNA
  modified_base 1: mod_base = OTHER; note = guanosine-3'-phosphate
  modified_base 2: mod_base = OTHER; note = guanosine-3'-phosphate
  modified_base 3: mod_base = OTHER; note = cytidine-3'-phosphate
  modified_base 4: mod_base = OTHER; note = guanosine-3'-phosphate
  modified_base 5: mod_base = OTHER; note = uridine-3'-phosphate
  modified_base 6: mod_base = OTHER; note = cytidine-3'-phosphate
  modified_base 7: mod_base = OTHER; note = cytidine-3'-phosphate
  modified_base 8: mod_base = OTHER; note = adenosine-3'-phosphate
  modified_base 9: mod_base = OTHER; note = guanosine-3'-phosphate
  modified_base 10: mod_base = OTHER; note = guanosine-3'-phosphate
  modified_base 11: mod_base = OTHER; note = uridine-3'-phosphate
  modified_base 12: mod_base = OTHER; note = uridine-3'-phosphate
  modified_base 13: mod_base = OTHER; note = guanosine-3'-phosphate
  modified_base 14: mod_base = OTHER; note = cytidine-3'-phosphate
  modified_base 15: mod_base = OTHER; note = cytidine-3'-phosphate
  modified_base 16: mod_base = OTHER; note = cytidine-3'-phosphate
  modified_base 17: mod_base = OTHER; note = uridine-3'-phosphate
  modified_base 18: mod_base = OTHER; note = guanosine-3'-phosphate
  modified_base 19: mod_base = OTHER; note = uridine-3'-phosphate
  misc_feature 1..19: note = RNA
  misc_feature 20..21: note = DNA
ggcgtccaggttgccctgttt

SEQ ID NO: 486 - DNA, 21 bp, synthetic construct
  source 1..21: mol_type = other DNA
  modified_base 1: mod_base = OTHER; note = cytidine-3'-phosphate
  modified_base 2: mod_base = OTHER; note = cytidine-3'-phosphate
  modified_base 3: mod_base = OTHER; note = cytidine-3'-phosphate
  modified_base 4: mod_base = OTHER; note = uridine-3'-phosphate
  modified_base 5: mod_base = OTHER; note = guanosine-3'-phosphate
  modified_base 6: mod_base = OTHER; note = uridine-3'-phosphate
  modified_base 7: mod_base = OTHER; note = uridine-3'-phosphate
  modified_base 8: mod_base = OTHER; note = cytidine-3'-phosphate
  modified_base 9: mod_base = OTHER; note = adenosine-3'-phosphate
  modified_base 10: mod_base = OTHER; note = guanosine-3'-phosphate
  modified_base 11: mod_base = OTHER; note = guanosine-3'-phosphate
  modified_base 12: mod_base = OTHER; note = guanosine-3'-phosphate
  modified_base 13: mod_base = OTHER; note = guanosine-3'-phosphate
  modified_base 14: mod_base = OTHER; note = adenosine-3'-phosphate
  modified_base 15: mod_base = OTHER; note = cytidine-3'-phosphate
  modified_base 16: mod_base = OTHER; note = adenosine-3'-phosphate
  modified_base 17: mod_base = OTHER; note = guanosine-3'-phosphate
  modified_base 18: mod_base = OTHER; note = adenosine-3'-phosphate
  modified_base 19: mod_base = OTHER; note = uridine-3'-phosphate
  misc_feature 1..19: note = RNA
  misc_feature 20..21: note = DNA
ccctgttcaggggacagattt

SEQ ID NO: 487 - DNA, 21 bp, synthetic construct
  source 1..21: mol_type = other DNA
  modified_base 1: mod_base = OTHER; note = guanosine-3'-phosphate
  modified_base 2: mod_base = OTHER; note = guanosine-3'-phosphate
  modified_base 3: mod_base = OTHER; note = guanosine-3'-phosphate
  modified_base 4: mod_base = OTHER; note = guanosine-3'-phosphate
  modified_base 5: mod_base = OTHER; note = adenosine-3'-phosphate
  modified_base 6: mod_base = OTHER; note = cytidine-3'-phosphate
  modified_base 7: mod_base = OTHER; note = adenosine-3'-phosphate
  modified_base 8: mod_base = OTHER; note = guanosine-3'-phosphate
  modified_base 9: mod_base = OTHER; note = adenosine-3'-phosphate
  modified_base 10: mod_base = OTHER; note = uridine-3'-phosphate
  modified_base 11: mod_base = OTHER; note = guanosine-3'-phosphate
  modified_base 12: mod_base = OTHER; note = cytidine-3'-phosphate
  modified_base 13: mod_base = OTHER; note = adenosine-3'-phosphate
  modified_base 14: mod_base = OTHER; note = adenosine-3'-phosphate
  modified_base 15: mod_base = OTHER; note = guanosine-3'-phosphate
  modified_base 16: mod_base = OTHER; note = cytidine-3'-phosphate
  modified_base 17: mod_base = OTHER; note = uridine-3'-phosphate
  modified_base 18: mod_base = OTHER; note = guanosine-3'-phosphate
  modified_base 19: mod_base = OTHER; note = uridine-3'-phosphate
  misc_feature 1..19: note = RNA
  misc_feature 20..21: note = DNA
ggggacagatgcaagctgttt

SEQ ID NO: 488 - DNA, 21 bp, synthetic construct
  source 1..21: mol_type = other DNA
  modified_base 1: mod_base = OTHER; note = cytidine-3'-phosphate
  modified_base 2: mod_base = OTHER; note = adenosine-3'-phosphate
  modified_base 3: mod_base = OTHER; note = adenosine-3'-phosphate
  modified_base 4: mod_base = OTHER; note = guanosine-3'-phosphate
  modified_base 5: mod_base = OTHER; note = cytidine-3'-phosphate
  modified_base 6: mod_base = OTHER; note = uridine-3'-phosphate
  modified_base 7: mod_base = OTHER; note = guanosine-3'-phosphate
  modified_base 8: mod_base = OTHER; note = uridine-3'-phosphate
  modified_base 9: mod_base = OTHER; note = guanosine-3'-phosphate
  modified_base 10: mod_base = OTHER; note = guanosine-3'-phosphate
  modified_base 11: mod_base = OTHER; note = guanosine-3'-phosphate
  modified_base 12: mod_base = OTHER; note = guanosine-3'-phosphate
  modified_base 13: mod_base = OTHER; note = adenosine-3'-phosphate
  modified_base 14: mod_base = OTHER; note = guanosine-3'-phosphate
  modified_base 15: mod_base = OTHER; note = guanosine-3'-phosphate
  modified_base 16: mod_base = OTHER; note = adenosine-3'-phosphate
  modified_base 17: mod_base = OTHER; note = cytidine-3'-phosphate
  modified_base 18: mod_base = OTHER; note = uridine-3'-phosphate
  modified_base 19: mod_base = OTHER; note = cytidine-3'-phosphate
  misc_feature 1..19: note = RNA
  misc_feature 20..21: note = DNA
caagctgtggggaggactctt

SEQ ID NO: 489 - DNA, 21 bp, synthetic construct
  source 1..21: mol_type = other DNA
  modified_base 1: mod_base = OTHER; note = adenosine-3'-phosphate
  modified_base 2: mod_base = OTHER; note = guanosine-3'-phosphate
  modified_base 3: mod_base = OTHER; note = guanosine-3'-phosphate
  modified_base 4: mod_base = OTHER; note = adenosine-3'-phosphate
  modified_base 5: mod_base = OTHER; note = cytidine-3'-phosphate
  modified_base 6: mod_base = OTHER; note = uridine-3'-phosphate
  modified_base 7: mod_base = OTHER; note = cytidine-3'-phosphate
  modified_base 8: mod_base = OTHER; note = uridine-3'-phosphate
  modified_base 9: mod_base = OTHER; note = guanosine-3'-phosphate
  modified_base 10: mod_base = OTHER; note = cytidine-3'-phosphate
  modified_base 11: mod_base = OTHER; note = cytidine-3'-phosphate
  modified_base 12: mod_base = OTHER; note = uridine-3'-phosphate
  modified_base 13: mod_base = OTHER; note = guanosine-3'-phosphate
  modified_base 14: mod_base = OTHER; note = uridine-3'-phosphate
  modified_base 15: mod_base = OTHER; note = guanosine-3'-phosphate
  modified_base 16: mod_base = OTHER; note = uridine-3'-phosphate
  modified_base 17: mod_base = OTHER; note = cytidine-3'-phosphate
  modified_base 18: mod_base = OTHER; note = cytidine-3'-phosphate
  modified_base 19: mod_base = OTHER; note = uridine-3'-phosphate
  misc_feature 1..19: note = RNA
  misc_feature 20..21: note = DNA
aggactctgcctgtgtccttt

SEQ ID NO: 490 - DNA, 21 bp, synthetic construct
  source 1..21: mol_type = other DNA
  modified_base 1: mod_base = OTHER; note = cytidine-3'-phosphate
  modified_base 2: mod_base = OTHER; note = uridine-3'-phosphate
  modified_base 3: mod_base = OTHER; note = guanosine-3'-phosphate
  modified_base 4: mod_base = OTHER; note = uridine-3'-phosphate
  modified_base 5: mod_base = OTHER; note = guanosine-3'-phosphate
  modified_base 6: mod_base = OTHER; note = uridine-3'-phosphate
  modified_base 7: mod_base = OTHER; note = cytidine-3'-phosphate
  modified_base 8: mod_base = OTHER; note = cytidine-3'-phosphate
  modified_base 9: mod_base = OTHER; note = uridine-3'-phosphate
  modified_base 10: mod_base = OTHER; note = guanosine-3'-phosphate
  modified_base 11: mod_base = OTHER; note = uridine-3'-phosphate
  modified_base 12: mod_base = OTHER; note = guanosine-3'-phosphate
  modified_base 13: mod_base = OTHER; note = uridine-3'-phosphate
  modified_base 14: mod_base = OTHER; note = uridine-3'-phosphate
  modified_base 15: mod_base = OTHER; note = cytidine-3'-phosphate
  modified_base 16: mod_base = OTHER; note = cytidine-3'-phosphate
  modified_base 17: mod_base = OTHER; note = cytidine-3'-phosphate
  modified_base 18: mod_base = OTHER; note = cytidine-3'-phosphate
  modified_base 19: mod_base = OTHER; note = adenosine-3'-phosphate
  misc_feature 1..19: note = RNA
  misc_feature 20..21: note = DNA
ctgtgtcctgtgttccccatt

SEQ ID NO: 491 - DNA, 21 bp, synthetic construct
  source 1..21: mol_type = other DNA
  modified_base 1: mod_base = OTHER; note = uridine-3'-phosphate
  modified_base 2: mod_base = OTHER; note = uridine-3'-phosphate
  modified_base 3: mod_base = OTHER; note = cytidine-3'-phosphate
  modified_base 4: mod_base = OTHER; note = cytidine-3'-phosphate
  modified_base 5: mod_base = OTHER; note = cytidine-3'-phosphate
  modified_base 6: mod_base = OTHER; note = cytidine-3'-phosphate
  modified_base 7: mod_base = OTHER; note = adenosine-3'-phosphate
  modified_base 8: mod_base = OTHER; note = cytidine-3'-phosphate
  modified_base 9: mod_base = OTHER; note = adenosine-3'-phosphate
  modified_base 10: mod_base = OTHER; note = guanosine-3'-phosphate
  modified_base 11: mod_base = OTHER; note = guanosine-3'-phosphate
  modified_base 12: mod_base = OTHER; note = guanosine-3'-phosphate
  modified_base 13: mod_base = OTHER; note = adenosine-3'-phosphate
  modified_base 14: mod_base = OTHER; note = guanosine-3'-phosphate
  modified_base 15: mod_base = OTHER; note = adenosine-3'-phosphate
  modified_base 16: mod_base = OTHER; note = guanosine-3'-phosphate
  modified_base 17: mod_base = OTHER; note = guanosine-3'-phosphate
  modified_base 18: mod_base = OTHER; note = cytidine-3'-phosphate
  modified_base 19: mod_base = OTHER; note = uridine-3'-phosphate
  misc_feature 1..19: note = RNA
  misc_feature 20..21: note = DNA
ttccccacagggagaggcttt

SEQ ID NO: 492 - DNA, 21 bp, synthetic construct
  source 1..21: mol_type = other DNA
  modified_base 1: mod_base = OTHER; note = adenosine-3'-phosphate
  modified_base 2: mod_base = OTHER; note = guanosine-3'-phosphate
  modified_base 3: mod_base = OTHER; note = adenosine-3'-phosphate
  modified_base 4: mod_base = OTHER; note = guanosine-3'-phosphate
  modified_base 5: mod_base = OTHER; note = guanosine-3'-phosphate
  modified_base 6: mod_base = OTHER; note = cytidine-3'-phosphate
  modified_base 7: mod_base = OTHER; note = uridine-3'-phosphate
  modified_base 8: mod_base = OTHER; note = cytidine-3'-phosphate
  modified_base 9: mod_base = OTHER; note = uridine-3'-phosphate
  modified_base 10: mod_base = OTHER; note = guanosine-3'-phosphate
  modified_base 11: mod_base = OTHER; note = guanosine-3'-phosphate
  modified_base 12: mod_base = OTHER; note = guanosine-3'-phosphate
  modified_base 13: mod_base = OTHER; note = guanosine-3'-phosphate
  modified_base 14: mod_base = OTHER; note = guanosine-3'-phosphate
  modified_base 15: mod_base = OTHER; note = guanosine-3'-phosphate
  modified_base 16: mod_base = OTHER; note = adenosine-3'-phosphate
  modified_base 17: mod_base = OTHER; note = uridine-3'-phosphate
  modified_base 18: mod_base = OTHER; note = guanosine-3'-phosphate
  modified_base 19: mod_base = OTHER; note = guanosine-3'-phosphate
  misc_feature 1..19: note = RNA
  misc_feature 20..21: note = DNA
agaggctctggggggatggtt

SEQ ID NO: 493 - DNA, 21 bp, synthetic construct
  source 1..21: mol_type = other DNA
  modified_base 1: mod_base = OTHER; note = guanosine-3'-phosphate
  modified_base 2: mod_base = OTHER; note = guanosine-3'-phosphate
  modified_base 3: mod_base = OTHER; note = guanosine-3'-phosphate
  modified_base 4: mod_base = OTHER; note = guanosine-3'-phosphate
  modified_base 5: mod_base = OTHER; note = guanosine-3'-phosphate
  modified_base 6: mod_base = OTHER; note = guanosine-3'-phosphate
  modified_base 7: mod_base = OTHER; note = adenosine-3'-phosphate
  modified_base 8: mod_base = OTHER; note = uridine-3'-phosphate
  modified_base 9: mod_base = OTHER; note = guanosine-3'-phosphate
  modified_base 10: mod_base = OTHER; note = guanosine-3'-phosphate
  modified_base 11: mod_base = OTHER; note = cytidine-3'-phosphate
  modified_base 12: mod_base = OTHER; note = uridine-3'-phosphate
  modified_base 13: mod_base = OTHER; note = guanosine-3'-phosphate
  modified_base 14: mod_base = OTHER; note = guanosine-3'-phosphate
  modified_base 15: mod_base = OTHER; note = guanosine-3'-phosphate
  modified_base 16: mod_base = OTHER; note = guanosine-3'-phosphate
  modified_base 17: mod_base = OTHER; note = guanosine-3'-phosphate
  modified_base 18: mod_base = OTHER; note = adenosine-3'-phosphate
  modified_base 19: mod_base = OTHER; note = uridine-3'-phosphate
  misc_feature 1..19: note = RNA
  misc_feature 20..21: note = DNA
ggggggatggctgggggattt

SEQ ID NO: 494 - DNA, 21 bp, synthetic construct
  source 1..21: mol_type = other DNA
  modified_base 1: mod_base = OTHER; note = uridine-3'-phosphate
  modified_base 2: mod_base = OTHER; note = guanosine-3'-phosphate
  modified_base 3: mod_base = OTHER; note = guanosine-3'-phosphate
  modified_base 4: mod_base = OTHER; note = guanosine-3'-phosphate
  modified_base 5: mod_base = OTHER; note = guanosine-3'-phosphate
  modified_base 6: mod_base = OTHER; note = guanosine-3'-phosphate
  modified_base 7: mod_base = OTHER; note = adenosine-3'-phosphate
  modified_base 8: mod_base = OTHER; note = uridine-3'-phosphate
  modified_base 9: mod_base = OTHER; note = guanosine-3'-phosphate
  modified_base 10: mod_base = OTHER; note = cytidine-3'-phosphate
  modified_base 11: mod_base = OTHER; note = adenosine-3'-phosphate
  modified_base 12: mod_base = OTHER; note = guanosine-3'-phosphate
  modified_base 13: mod_base = OTHER; note = adenosine-3'-phosphate
  modified_base 14: mod_base = OTHER; note = guanosine-3'-phosphate
  modified_base 15: mod_base = OTHER; note = cytidine-3'-phosphate
  modified_base 16: mod_base = OTHER; note = cytidine-3'-phosphate
  modified_base 17: mod_base = OTHER; note = uridine-3'-phosphate
  modified_base 18: mod_base = OTHER; note = cytidine-3'-phosphate
  modified_base 19: mod_base = OTHER; note = adenosine-3'-phosphate
  misc_feature 1..19: note = RNA
  misc_feature 20..21: note = DNA
tgggggatgcagagcctcatt

SEQ ID NO: 495 - DNA, 21 bp, synthetic construct
  source 1..21: mol_type = other DNA
  modified_base 1: mod_base = OTHER; note = adenosine-3'-phosphate
  modified_base 2: mod_base = OTHER; note = guanosine-3'-phosphate
  modified_base 3: mod_base = OTHER; note = cytidine-3'-phosphate
  modified_base 4: mod_base = OTHER; note = cytidine-3'-phosphate
  modified_base 5: mod_base = OTHER; note = uridine-3'-phosphate
  modified_base 6: mod_base = OTHER; note = cytidine-3'-phosphate
  modified_base 7: mod_base = OTHER; note = adenosine-3'-phosphate
  modified_base 8: mod_base = OTHER; note = guanosine-3'-phosphate
  modified_base 9: mod_base = OTHER; note = adenosine-3'-phosphate
  modified_base 10: mod_base = OTHER; note = guanosine-3'-phosphate
  modified_base 11: mod_base = OTHER; note = cytidine-3'-phosphate
  modified_base 12: mod_base = OTHER; note = adenosine-3'-phosphate
  modified_base 13: mod_base = OTHER; note = adenosine-3'-phosphate
  modified_base 14: mod_base = OTHER; note = adenosine-3'-phosphate
  modified_base 15: mod_base = OTHER; note = uridine-3'-phosphate
  modified_base 16: mod_base = OTHER; note = adenosine-3'-phosphate
  modified_base 17: mod_base = OTHER; note = adenosine-3'-phosphate
  modified_base 18: mod_base = OTHER; note = adenosine-3'-phosphate
  modified_base 19: mod_base = OTHER; note = uridine-3'-phosphate
  misc_feature 1..19: note = RNA
  misc_feature 20..21: note = DNA
agcctcagagcaaataaattt

SEQ ID NO: 496 - DNA, 21 bp, synthetic construct
  source 1..21: mol_type = other DNA
  modified_base 1: mod_base = OTHER; note = adenosine-3'-phosphate
  modified_base 2: mod_base = OTHER; note = adenosine-3'-phosphate
  modified_base 3: mod_base = OTHER; note = adenosine-3'-phosphate
  modified_base 4: mod_base = OTHER; note = uridine-3'-phosphate
  modified_base 5: mod_base = OTHER; note = adenosine-3'-phosphate
  modified_base 6: mod_base = OTHER; note = adenosine-3'-phosphate
  modified_base 7: mod_base = OTHER; note = adenosine-3'-phosphate
  modified_base 8: mod_base = OTHER; note = uridine-3'-phosphate
  modified_base 9: mod_base = OTHER; note = cytidine-3'-phosphate
  modified_base 10: mod_base = OTHER; note = uridine-3'-phosphate
  modified_base 11: mod_base = OTHER; note = uridine-3'-phosphate
  modified_base 12: mod_base = OTHER; note = cytidine-3'-phosphate
  modified_base 13: mod_base = OTHER; note = cytidine-3'-phosphate
  modified_base 14: mod_base = OTHER; note = uridine-3'-phosphate
  modified_base 15: mod_base = OTHER; note = cytidine-3'-phosphate
  modified_base 16: mod_base = OTHER; note = adenosine-3'-phosphate
  modified_base 17: mod_base = OTHER; note = guanosine-3'-phosphate
  modified_base 18: mod_base = OTHER; note = adenosine-3'-phosphate
  modified_base 19: mod_base = OTHER; note = guanosine-3'-phosphate
  misc_feature 1..19: note = RNA
  misc_feature 20..21: note = DNA
aaataaatcttcctcagagtt

SEQ ID NO: 497 - DNA, 21 bp, synthetic construct
  source 1..21: mol_type = other DNA
  modified_base 1: mod_base = OTHER; note = cytidine-3'-phosphate
  modified_base 2: mod_base = OTHER; note = cytidine-3'-phosphate
  modified_base 3: mod_base = OTHER; note = uridine-3'-phosphate
  modified_base 4: mod_base = OTHER; note = cytidine-3'-phosphate
  modified_base 5: mod_base = OTHER; note = adenosine-3'-phosphate
  modified_base 6: mod_base = OTHER; note = guanosine-3'-phosphate
  modified_base 7: mod_base = OTHER; note = adenosine-3'-phosphate
  modified_base 8: mod_base = OTHER; note = guanosine-3'-phosphate
  modified_base 9: mod_base = OTHER; note = cytidine-3'-phosphate
  modified_base 10: mod_base = OTHER; note = cytidine-3'-phosphate
  modified_base 11: mod_base = OTHER; note = adenosine-3'-phosphate
  modified_base 12: mod_base = OTHER; note = guanosine-3'-phosphate
  modified_base 13: mod_base = OTHER; note = cytidine-3'-phosphate
  modified_base 14: mod_base = OTHER; note = uridine-3'-phosphate
  modified_base 15: mod_base = OTHER; note = uridine-3'-phosphate
  modified_base 16: mod_base = OTHER; note = cytidine-3'-phosphate
  modified_base 17: mod_base = OTHER; note = uridine-3'-phosphate
  modified_base 18: mod_base = OTHER; note = cytidine-3'-phosphate
  modified_base 19: mod_base = OTHER; note = cytidine-3'-phosphate
  misc_feature 1..19: note = RNA
  misc_feature 20..21: note = DNA
cctcagagccagcttctcctt

SEQ ID NO: 498 - DNA, 21 bp, synthetic construct
  source 1..21: mol_type = other DNA
  modified_base 1: mod_base = OTHER; note = adenosine-3'-phosphate
  modified_base 2: mod_base = OTHER; note = guanosine-3'-phosphate
  modified_base 3: mod_base = OTHER; note = cytidine-3'-phosphate
  modified_base 4: mod_base = OTHER; note = uridine-3'-phosphate
  modified_base 5: mod_base = OTHER; note = uridine-3'-phosphate
  modified_base 6: mod_base = OTHER; note = cytidine-3'-phosphate
  modified_base 7: mod_base = OTHER; note = uridine-3'-phosphate
  modified_base 8: mod_base = OTHER; note = cytidine-3'-phosphate
  modified_base 9: mod_base = OTHER; note = cytidine-3'-phosphate
  modified_base 10: mod_base = OTHER; note = uridine-3'-phosphate
  modified_base 11: mod_base = OTHER; note = cytidine-3'-phosphate
  modified_base 12: mod_base = OTHER; note = uridine-3'-phosphate
  modified_base 13: mod_base = OTHER; note = cytidine-3'-phosphate
  modified_base 14: mod_base = OTHER; note = adenosine-3'-phosphate
  modified_base 15: mod_base = OTHER; note = adenosine-3'-phosphate
  modified_base 16: mod_base = OTHER; note = uridine-3'-phosphate
  modified_base 17: mod_base = OTHER; note = guanosine-3'-phosphate
  modified_base 18: mod_base = OTHER; note = uridine-3'-phosphate
  modified_base 19: mod_base = OTHER; note = cytidine-3'-phosphate
  misc_feature 1..19: note = RNA
  misc_feature 20..21: note = DNA
agcttctcctctcaatgtctt

SEQ ID NO: 499 - DNA, 21 bp, synthetic construct
  source 1..21: mol_type = other DNA
  modified_base 1: mod_base = OTHER; note = uridine-3'-phosphate
  modified_base 2: mod_base = OTHER; note = cytidine-3'-phosphate
  modified_base 3: mod_base = OTHER; note = adenosine-3'-phosphate
  modified_base 4: mod_base = OTHER; note = adenosine-3'-phosphate
  modified_base 5: mod_base = OTHER; note = uridine-3'-phosphate
  modified_base 6: mod_base = OTHER; note = guanosine-3'-phosphate
  modified_base 7: mod_base = OTHER; note = uridine-3'-phosphate
  modified_base 8: mod_base = OTHER; note = cytidine-3'-phosphate
  modified_base 9: mod_base = OTHER; note = uridine-3'-phosphate
  modified_base 10: mod_base = OTHER; note = guanosine-3'-phosphate
  modified_base 11: mod_base = OTHER; note = adenosine-3'-phosphate
  modified_base 12: mod_base = OTHER; note = adenosine-3'-phosphate
  modified_base 13: mod_base = OTHER; note = cytidine-3'-phosphate
  modified_base 14: mod_base = OTHER; note = uridine-3'-phosphate
  modified_base 15: mod_base = OTHER; note = guanosine-3'-phosphate
  modified_base 16: mod_base = OTHER; note = cytidine-3'-phosphate
  modified_base 17: mod_base = OTHER; note = uridine-3'-phosphate
  modified_base 18: mod_base = OTHER; note = cytidine-3'-phosphate
  modified_base 19: mod_base = OTHER; note = uridine-3'-phosphate
  misc_feature 1..19: note = RNA
  misc_feature 20..21: note = DNA
tcaatgtctgaactgctcttt

SEQ ID NO: 500 - DNA, 21 bp, synthetic construct
  source 1..21: mol_type = other DNA
  modified_base 1: mod_base = OTHER; note = uridine-3'-phosphate
  modified_base 2: mod_base = OTHER; note = guanosine-3'-phosphate
  modified_base 3: mod_base = OTHER; note = cytidine-3'-phosphate
  modified_base 4: mod_base = OTHER; note = uridine-3'-phosphate
  modified_base 5: mod_base = OTHER; note = cytidine-3'-phosphate
  modified_base 6: mod_base = OTHER; note = uridine-3'-phosphate
  modified_base 7: mod_base = OTHER; note = guanosine-3'-phosphate
  modified_base 8: mod_base = OTHER; note = guanosine-3'-phosphate
  modified_base 9: mod_base = OTHER; note = cytidine-3'-phosphate
  modified_base 10: mod_base = OTHER; note = uridine-3'-phosphate
  modified_base 11: mod_base = OTHER; note = guanosine-3'-phosphate
  modified_base 12: mod_base = OTHER; note = guanosine-3'-phosphate
  modified_base 13: mod_base = OTHER; note = guanosine-3'-phosphate
  modified_base 14: mod_base = OTHER; note = cytidine-3'-phosphate
  modified_base 15: mod_base = OTHER; note = adenosine-3'-phosphate
  modified_base 16: mod_base = OTHER; note = uridine-3'-phosphate
  modified_base 17: mod_base = OTHER; note = uridine-3'-phosphate
  modified_base 18: mod_base = OTHER; note = cytidine-3'-phosphate
  modified_base 19: mod_base = OTHER; note = cytidine-3'-phosphate
  misc_feature 1..19: note = RNA
  misc_feature 20..21: note = DNA
tgctctggctgggcattcctt

SEQ ID NO: 501 - DNA, 21 bp, synthetic construct
  source 1..21: mol_type = other DNA
  modified_base 1: mod_base = OTHER; note = uridine-3'-phosphate
  modified_base 2: mod_base = OTHER; note = guanosine-3'-phosphate
  modified_base 3: mod_base = OTHER; note = guanosine-3'-phosphate
  modified_base 4: mod_base = OTHER; note = guanosine-3'-phosphate
  modified_base 5: mod_base = OTHER; note = cytidine-3'-phosphate
  modified_base 6: mod_base = OTHER; note = adenosine-3'-phosphate
  modified_base 7: mod_base = OTHER; note = uridine-3'-phosphate
  modified_base 8: mod_base = OTHER; note = uridine-3'-phosphate
  modified_base 9: mod_base = OTHER; note = cytidine-3'-phosphate
  modified_base 10: mod_base = OTHER; note = cytidine-3'-phosphate
  modified_base 11: mod_base = OTHER; note = uridine-3'-phosphate
  modified_base 12: mod_base = OTHER; note = guanosine-3'-phosphate
  modified_base 13: mod_base = OTHER; note = adenosine-3'-phosphate
  modified_base 14: mod_base = OTHER; note = guanosine-3'-phosphate
  modified_base 15: mod_base = OTHER; note = guanosine-3'-phosphate
  modified_base 16: mod_base = OTHER; note = cytidine-3'-phosphate
  modified_base 17: mod_base = OTHER; note = uridine-3'-phosphate
  modified_base 18: mod_base = OTHER; note = cytidine-3'-phosphate
  modified_base 19: mod_base = OTHER; note = uridine-3'-phosphate
  misc_feature 1..19: note = RNA
  misc_feature 20..21: note = DNA
tgggcattcctgaggctcttt

SEQ ID NO: 502 - DNA, 21 bp, synthetic construct
  source 1..21: mol_type = other DNA
  modified_base 1: mod_base = OTHER; note = guanosine-3'-phosphate
  modified_base 2: mod_base = OTHER; note = adenosine-3'-phosphate
  modified_base 3: mod_base = OTHER; note = guanosine-3'-phosphate
  modified_base 4: mod_base = OTHER; note = guanosine-3'-phosphate
  modified_base 5: mod_base = OTHER; note = cytidine-3'-phosphate
  modified_base 6: mod_base = OTHER; note = uridine-3'-phosphate
  modified_base 7: mod_base = OTHER; note = cytidine-3'-phosphate
  modified_base 8: mod_base = OTHER; note = uridine-3'-phosphate
  modified_base 9: mod_base = OTHER; note = guanosine-3'-phosphate
  modified_base 10: mod_base = OTHER; note = adenosine-3'-phosphate
  modified_base 11: mod_base = OTHER; note = cytidine-3'-phosphate
  modified_base 12: mod_base = OTHER; note = uridine-3'-phosphate
  modified_base 13: mod_base = OTHER; note = cytidine-3'-phosphate
  modified_base 14: mod_base = OTHER; note = uridine-3'-phosphate
  modified_base 15: mod_base = OTHER; note = uridine-3'-phosphate
  modified_base 16: mod_base = OTHER; note = cytidine-3'-phosphate
  modified_base 17: mod_base = OTHER; note = guanosine-3'-phosphate
  modified_base 18: mod_base = OTHER; note = adenosine-3'-phosphate
  modified_base 19: mod_base = OTHER; note = uridine-3'-phosphate
  misc_feature 1..19: note = RNA
  misc_feature 20..21: note = DNA
gaggctctgactcttcgattt

SEQ ID NO: 503 - DNA, 21 bp, synthetic construct
  source 1..21: mol_type = other DNA
  modified_base 1: mod_base = OTHER; note = cytidine-3'-phosphate
  modified_base 2: mod_base = OTHER; note = cytidine-3'-phosphate
  modified_base 3: mod_base = OTHER; note = adenosine-3'-phosphate
  modified_base 4: mod_base = OTHER; note = uridine-3'-phosphate
  modified_base 5: mod_base = OTHER; note = uridine-3'-phosphate
  modified_base 6: mod_base = OTHER; note = cytidine-3'-phosphate
  modified_base 7: mod_base = OTHER; note = cytidine-3'-phosphate
  modified_base 8: mod_base = OTHER; note = cytidine-3'-phosphate
  modified_base 9: mod_base = OTHER; note = cytidine-3'-phosphate
  modified_base 10: mod_base = OTHER; note = adenosine-3'-phosphate
  modified_base 11: mod_base = OTHER; note = adenosine-3'-phosphate
  modified_base 12: mod_base = OTHER; note = adenosine-3'-phosphate
  modified_base 13: mod_base = OTHER; note = uridine-3'-phosphate
  modified_base 14: mod_base = OTHER; note = uridine-3'-phosphate
  modified_base 15: mod_base = OTHER; note = adenosine-3'-phosphate
  modified_base 16: mod_base = OTHER; note = adenosine-3'-phosphate
  modified_base 17: mod_base = OTHER; note = cytidine-3'-phosphate
  modified_base 18: mod_base = OTHER; note = cytidine-3'-phosphate
  modified_base 19: mod_base = OTHER; note = uridine-3'-phosphate
  misc_feature 1..19: note = RNA
  misc_feature 20..21: note = DNA
ccattccccaaattaaccttt

SEQ ID NO: 504 - DNA, 21 bp, synthetic construct
  source 1..21: mol_type = other DNA
  modified_base 1: mod_base = OTHER; note = uridine-3'-phosphate
  modified_base 2: mod_base = OTHER; note = uridine-3'-phosphate
  modified_base 3: mod_base = OTHER; note = adenosine-3'-phosphate
  modified_base 4: mod_base = OTHER; note = adenosine-3'-phosphate
  modified_base 5: mod_base = OTHER; note = cytidine-3'-phosphate
  modified_base 6: mod_base = OTHER; note = cytidine-3'-phosphate
  modified_base 7: mod_base = OTHER; note = uridine-3'-phosphate
  modified_base 8: mod_base = OTHER; note = cytidine-3'-phosphate
  modified_base 9: mod_base = OTHER; note = uridine-3'-phosphate
  modified_base 10: mod_base = OTHER; note = cytidine-3'-phosphate
  modified_base 11: mod_base = OTHER; note = cytidine-3'-phosphate
  modified_base 12: mod_base = OTHER; note = guanosine-3'-phosphate
  modified_base 13: mod_base = OTHER; note = cytidine-3'-phosphate
  modified_base 14: mod_base = OTHER; note = cytidine-3'-phosphate
  modified_base 15: mod_base = OTHER; note = cytidine-3'-phosphate
  modified_base 16: mod_base = OTHER; note = adenosine-3'-phosphate
  modified_base 17: mod_base = OTHER; note = guanosine-3'-phosphate
  modified_base 18: mod_base = OTHER; note = guanosine-3'-phosphate
  modified_base 19: mod_base = OTHER; note = cytidine-3'-phosphate
  misc_feature 1..19: note = RNA
  misc_feature 20..21: note = DNA
ttaacctctccgcccaggctt

SEQ ID NO: 505 - DNA, 21 bp, synthetic construct
  source 1..21: mol_type = other DNA
  modified_base 1: mod_base = OTHER; note = guanosine-3'-phosphate
  modified_base 2: mod_base = OTHER; note = cytidine-3'-phosphate
  modified_base 3: mod_base = OTHER; note = cytidine-3'-phosphate
  modified_base 4: mod_base = OTHER; note = cytidine-3'-phosphate
  modified_base 5: mod_base = OTHER; note = adenosine-3'-phosphate
  modified_base 6: mod_base = OTHER; note = guanosine-3'-phosphate
  modified_base 7: mod_base = OTHER; note = guanosine-3'-phosphate
  modified_base 8: mod_base = OTHER; note = cytidine-3'-phosphate
  modified_base 9: mod_base = OTHER; note = cytidine-3'-phosphate
  modified_base 10: mod_base = OTHER; note = cytidine-3'-phosphate
  modified_base 11: mod_base = OTHER; note = adenosine-3'-phosphate
  modified_base 12: mod_base = OTHER; note = guanosine-3'-phosphate
  modified_base 13: mod_base = OTHER; note = adenosine-3'-phosphate
  modified_base 14: mod_base = OTHER; note = guanosine-3'-phosphate
  modified_base 15: mod_base = OTHER; note = guanosine-3'-phosphate
  modified_base 16: mod_base = OTHER; note = adenosine-3'-phosphate
  modified_base 17: mod_base = OTHER; note = guanosine-3'-phosphate
  modified_base 18: mod_base = OTHER; note = guanosine-3'-phosphate
  modified_base 19: mod_base = OTHER; note = guanosine-3'-phosphate
  misc_feature 1..19: note = RNA
  misc_feature 20..21: note = DNA
gcccaggcccagaggagggtt

SEQ ID NO: 506 - DNA, 21 bp, synthetic construct
  source 1..21: mol_type = other DNA
  modified_base 1: mod_base = OTHER; note = cytidine-3'-phosphate
  modified_base 2: mod_base = OTHER; note = adenosine-3'-phosphate
  modified_base 3: mod_base = OTHER; note = guanosine-3'-phosphate
  modified_base 4: mod_base = OTHER; note = adenosine-3'-phosphate
  modified_base 5: mod_base = OTHER; note = guanosine-3'-phosphate
  modified_base 6: mod_base = OTHER; note = guanosine-3'-phosphate
  modified_base 7: mod_base = OTHER; note = adenosine-3'-phosphate
  modified_base 8: mod_base = OTHER; note = guanosine-3'-phosphate
  modified_base 9: mod_base = OTHER; note = guanosine-3'-phosphate
  modified_base 10: mod_base = OTHER; note = guanosine-3'-phosphate
  modified_base 11: mod_base = OTHER; note = guanosine-3'-phosphate
  modified_base 12: mod_base = OTHER; note = cytidine-3'-phosphate
  modified_base 13: mod_base = OTHER; note = uridine-3'-phosphate
  modified_base 14: mod_base = OTHER; note = guanosine-3'-phosphate
  modified_base 15: mod_base = OTHER; note = cytidine-3'-phosphate
  modified_base 16: mod_base = OTHER; note = cytidine-3'-phosphate
  modified_base 17: mod_base = OTHER; note = uridine-3'-phosphate
  modified_base 18: mod_base = OTHER; note = guanosine-3'-phosphate
  modified_base 19: mod_base = OTHER; note = guanosine-3'-phosphate
  misc_feature 1..19: note = RNA
  misc_feature 20..21: note = DNA
cagaggaggggctgcctggtt

SEQ ID NO: 507 - DNA, 21 bp, synthetic construct
  source 1..21: mol_type = other DNA
  modified_base 1: mod_base = OTHER; note = uridine-3'-phosphate
  modified_base 2: mod_base = OTHER; note = guanosine-3'-phosphate
  modified_base 3: mod_base = OTHER; note = cytidine-3'-phosphate
  modified_base 4: mod_base = OTHER; note = cytidine-3'-phosphate
  modified_base 5: mod_base = OTHER; note = uridine-3'-phosphate
  modified_base 6: mod_base = OTHER; note = guanosine-3'-phosphate
  modified_base 7: mod_base = OTHER; note = guanosine-3'-phosphate
  modified_base 8: mod_base = OTHER; note = guanosine-3'-phosphate
  modified_base 9: mod_base = OTHER; note = cytidine-3'-phosphate
  modified_base 10: mod_base = OTHER; note = uridine-3'-phosphate
  modified_base 11: mod_base = OTHER; note = adenosine-3'-phosphate
  modified_base 12: mod_base = OTHER; note = guanosine-3'-phosphate
  modified_base 13: mod_base = OTHER; note = adenosine-3'-phosphate
  modified_base 14: mod_base = OTHER; note = guanosine-3'-phosphate
  modified_base 15: mod_base = OTHER; note = cytidine-3'-phosphate
  modified_base 16: mod_base = OTHER; note = adenosine-3'-phosphate
  modified_base 17: mod_base = OTHER; note = guanosine-3'-phosphate
  modified_base 18: mod_base = OTHER; note = cytidine-3'-phosphate
  modified_base 19: mod_base = OTHER; note = guanosine-3'-phosphate
  misc_feature 1..19: note = RNA
  misc_feature 20..21: note = DNA
tgcctgggctagagcagcgtt

SEQ ID NO: 508 - DNA, 21 bp, synthetic construct
  source 1..21: mol_type = other DNA
  modified_base 1: mod_base = OTHER; note = adenosine-3'-phosphate
  modified_base 2: mod_base = OTHER; note = guanosine-3'-phosphate
  modified_base 3: mod_base = OTHER; note = adenosine-3'-phosphate
  modified_base 4: mod_base = OTHER; note = guanosine-3'-phosphate
  modified_base 5: mod_base = OTHER; note = cytidine-3'-phosphate
  modified_base 6: mod_base = OTHER; note = adenosine-3'-phosphate
  modified_base 7: mod_base = OTHER; note = guanosine-3'-phosphate
  modified_base 8: mod_base = OTHER; note = cytidine-3'-phosphate
  modified_base 9: mod_base = OTHER; note = guanosine-3'-phosphate
  modified_base 10: mod_base = OTHER; note = adenosine-3'-phosphate
  modified_base 11: mod_base = OTHER; note = guanosine-3'-phosphate
  modified_base 12: mod_base = OTHER; note = adenosine-3'-phosphate
  modified_base 13: mod_base = OTHER; note = adenosine-3'-phosphate
  modified_base 14: mod_base = OTHER; note = guanosine-3'-phosphate
  modified_base 15: mod_base = OTHER; note = uridine-3'-phosphate
  modified_base 16: mod_base = OTHER; note = guanosine-3'-phosphate
  modified_base 17: mod_base = OTHER; note = cytidine-3'-phosphate
  modified_base 18: mod_base = OTHER; note = cytidine-3'-phosphate
  modified_base 19: mod_base = OTHER; note = cytidine-3'-phosphate
  misc_feature 1..19: note = RNA
  misc_feature 20..21: note = DNA
agagcagcgagaagtgccctt

SEQ ID NO: 509 - DNA, 21 bp, synthetic construct
  source 1..21: mol_type = other DNA
  modified_base 1: mod_base = OTHER; note = adenosine-3'-phosphate
  modified_base 2: mod_base = OTHER; note = adenosine-3'-phosphate
  modified_base 3: mod_base = OTHER; note = guanosine-3'-phosphate
  modified_base 4: mod_base = OTHER; note = uridine-3'-phosphate
  modified_base 5: mod_base = OTHER; note = guanosine-3'-phosphate
  modified_base 6: mod_base = OTHER; note = cytidine-3'-phosphate
  modified_base 7: mod_base = OTHER; note = cytidine-3'-phosphate
  modified_base 8: mod_base = OTHER; note = cytidine-3'-phosphate
  modified_base 9: mod_base = OTHER; note = uridine-3'-phosphate
  modified_base 10: mod_base = OTHER; note = guanosine-3'-phosphate
  modified_base 11: mod_base = OTHER; note = guanosine-3'-phosphate
  modified_base 12: mod_base = OTHER; note = guanosine-3'-phosphate
  modified_base 13: mod_base = OTHER; note = cytidine-3'-phosphate
  modified_base 14: mod_base = OTHER; note = uridine-3'-phosphate
  modified_base 15: mod_base = OTHER; note = uridine-3'-phosphate
  modified_base 16: mod_base = OTHER; note = guanosine-3'-phosphate
  modified_base 17: mod_base = OTHER; note = cytidine-3'-phosphate
  modified_base 18: mod_base = OTHER; note = cytidine-3'-phosphate
  modified_base 19: mod_base = OTHER; note = adenosine-3'-phosphate
  misc_feature 1..19: note = RNA
  misc_feature 20..21: note = DNA
aagtgccctgggcttgccatt

SEQ ID NO: 510 - DNA, 21 bp, synthetic construct
  source 1..21: mol_type = other DNA
  modified_base 1: mod_base = OTHER; note = uridine-3'-phosphate
  modified_base 2: mod_base = OTHER; note = uridine-3'-phosphate
  modified_base 3: mod_base = OTHER; note = guanosine-3'-phosphate
  modified_base 4: mod_base = OTHER; note = cytidine-3'-phosphate
  modified_base 5: mod_base = OTHER; note = cytidine-3'-phosphate
  modified_base 6: mod_base = OTHER; note = adenosine-3'-phosphate
  modified_base 7: mod_base = OTHER; note = cytidine-3'-phosphate
  modified_base 8: mod_base = OTHER; note = cytidine-3'-phosphate
  modified_base 9: mod_base = OTHER; note = adenosine-3'-phosphate
  modified_base 10: mod_base = OTHER; note = guanosine-3'-phosphate
  modified_base 11: mod_base = OTHER; note = cytidine-3'-phosphate
  modified_base 12: mod_base = OTHER; note = uridine-3'-phosphate
  modified_base 13: mod_base = OTHER; note = cytidine-3'-phosphate
  modified_base 14: mod_base = OTHER; note = uridine-3'-phosphate
  modified_base 15: mod_base = OTHER; note = guanosine-3'-phosphate
  modified_base 16: mod_base = OTHER; note = cytidine-3'-phosphate
  modified_base 17: mod_base = OTHER; note = cytidine-3'-phosphate
  modified_base 18: mod_base = OTHER; note = cytidine-3'-phosphate
  modified_base 19: mod_base = OTHER; note = uridine-3'-phosphate
  misc_feature 1..19: note = RNA
  misc_feature 20..21: note = DNA
ttgccaccagctctgcccttt

SEQ ID NO: 511 - DNA, 21 bp, synthetic construct
  source 1..21: mol_type = other DNA
  modified_base 1: mod_base = OTHER; note = cytidine-3'-phosphate
  modified_base 2: mod_base = OTHER; note = uridine-3'-phosphate
  modified_base 3: mod_base = OTHER; note = cytidine-3'-phosphate
  modified_base 4: mod_base = OTHER; note = uridine-3'-phosphate
  modified_base 5: mod_base = OTHER; note = guanosine-3'-phosphate
  modified_base 6: mod_base = OTHER; note = cytidine-3'-phosphate
  modified_base 7: mod_base = OTHER; note = cytidine-3'-phosphate
  modified_base 8: mod_base = OTHER; note = cytidine-3'-phosphate
  modified_base 9: mod_base = OTHER; note = uridine-3'-phosphate
  modified_base 10: mod_base = OTHER; note = guanosine-3'-phosphate
  modified_base 11: mod_base = OTHER; note = guanosine-3'-phosphate
  modified_base 12: mod_base = OTHER; note = cytidine-3'-phosphate
  modified_base 13: mod_base = OTHER; note = uridine-3'-phosphate
  modified_base 14: mod_base = OTHER; note = guanosine-3'-phosphate
  modified_base 15: mod_base = OTHER; note = guanosine-3'-phosphate
  modified_base 16: mod_base = OTHER; note = guanosine-3'-phosphate
  modified_base 17: mod_base = OTHER; note = guanosine-3'-phosphate
  modified_base 18: mod_base = OTHER; note = adenosine-3'-phosphate
  modified_base 19: mod_base = OTHER; note = guanosine-3'-phosphate
  misc_feature 1..19: note = RNA
  misc_feature 20..21: note = DNA
ctctgccctggctggggagtt

SEQ ID NO: 512 - DNA, 21 bp, synthetic construct
  source 1..21: mol_type = other DNA
  modified_base 1: mod_base = OTHER; note = guanosine-3'-phosphate
  modified_base 2: mod_base = OTHER; note = cytidine-3'-phosphate
  modified_base 3: mod_base = OTHER; note = uridine-3'-phosphate
  modified_base 4: mod_base = OTHER; note = guanosine-3'-phosphate
  modified_base 5: mod_base = OTHER; note = guanosine-3'-phosphate
  modified_base 6: mod_base = OTHER; note = guanosine-3'-phosphate
  modified_base 7: mod_base = OTHER; note = guanosine-3'-phosphate
  modified_base 8: mod_base = OTHER; note = adenosine-3'-phosphate
  modified_base 9: mod_base = OTHER; note = guanosine-3'-phosphate
  modified_base 10: mod_base = OTHER; note = guanosine-3'-phosphate
  modified_base 11: mod_base = OTHER; note = adenosine-3'-phosphate
  modified_base 12: mod_base = OTHER; note = cytidine-3'-phosphate
  modified_base 13: mod_base = OTHER; note = adenosine-3'-phosphate
  modified_base 14: mod_base = OTHER; note = cytidine-3'-phosphate
  modified_base 15: mod_base = OTHER; note = uridine-3'-phosphate
  modified_base 16: mod_base = OTHER; note = cytidine-3'-phosphate
  modified_base 17: mod_base = OTHER; note = guanosine-3'-phosphate
  modified_base 18: mod_base = OTHER; note = guanosine-3'-phosphate
  modified_base 19: mod_base = OTHER; note = uridine-3'-phosphate
  misc_feature 1..19: note = RNA
  misc_feature 20..21: note = DNA
gctggggaggacactcggttt

SEQ ID NO: 513 - DNA, 21 bp, synthetic construct
  source 1..21: mol_type = other DNA
  modified_base 1: mod_base = OTHER; note = adenosine-3'-phosphate
  modified_base 2: mod_base = OTHER; note = cytidine-3'-phosphate
  modified_base 3: mod_base = OTHER; note = adenosine-3'-phosphate
  modified_base 4: mod_base = OTHER; note = cytidine-3'-phosphate
  modified_base 5: mod_base = OTHER; note = cytidine-3'-phosphate
  modified_base 6: mod_base = OTHER; note = cytidine-3'-phosphate
  modified_base 7: mod_base = OTHER; note = adenosine-3'-phosphate
  modified_base 8: mod_base = OTHER; note = guanosine-3'-phosphate
  modified_base 9: mod_base = OTHER; note = uridine-3'-phosphate
  modified_base 10: mod_base = OTHER; note = guanosine-3'-phosphate
  modified_base 11: mod_base = OTHER; note = adenosine-3'-phosphate
  modified_base 12: mod_base = OTHER; note = adenosine-3'-phosphate
  modified_base 13: mod_base = OTHER; note = cytidine-3'-phosphate
  modified_base 14: mod_base = OTHER; note = cytidine-3'-phosphate
  modified_base 15: mod_base = OTHER; note = uridine-3'-phosphate
  modified_base 16: mod_base = OTHER; note = guanosine-3'-phosphate
  modified_base 17: mod_base = OTHER; note = cytidine-3'-phosphate
  modified_base 18: mod_base = OTHER; note = cytidine-3'-phosphate
  modified_base 19: mod_base = OTHER; note = adenosine-3'-phosphate
  misc_feature 1..19: note = RNA
  misc_feature 20..21: note = DNA
acacccagtgaacctgccatt

SEQ ID NO: 514 - DNA, 21 bp, synthetic construct
  source 1..21: mol_type = other DNA
  modified_base 1: mod_base = OTHER; note = adenosine-3'-phosphate
  modified_base 2: mod_base = OTHER; note = adenosine-3'-phosphate
  modified_base 3: mod_base = OTHER; note = cytidine-3'-phosphate
  modified_base 4: mod_base = OTHER; note = cytidine-3'-phosphate
  modified_base 5: mod_base = OTHER; note = uridine-3'-phosphate
  modified_base 6: mod_base = OTHER; note = guanosine-3'-phosphate
  modified_base 7: mod_base = OTHER; note = cytidine-3'-phosphate
  modified_base 8: mod_base = OTHER; note = cytidine-3'-phosphate
  modified_base 9: mod_base = OTHER; note = adenosine-3'-phosphate
  modified_base 10: mod_base = OTHER; note = adenosine-3'-phosphate
  modified_base 11: mod_base = OTHER; note = adenosine-3'-phosphate
  modified_base 12: mod_base = OTHER; note = guanosine-3'-phosphate
  modified_base 13: mod_base = OTHER; note = adenosine-3'-phosphate
  modified_base 14: mod_base = OTHER; note = adenosine-3'-phosphate
  modified_base 15: mod_base = OTHER; note = adenosine-3'-phosphate
  modified_base 16: mod_base = OTHER; note = cytidine-3'-phosphate
  modified_base 17: mod_base = OTHER; note = cytidine-3'-phosphate
  modified_base 18: mod_base = OTHER; note = guanosine-3'-phosphate
  modified_base 19: mod_base = OTHER; note = uridine-3'-phosphate
  misc_feature 1..19: note = RNA
  misc_feature 20..21: note = DNA
aacctgccaaagaaaccgttt

SEQ ID NO: 515 - DNA, 21 bp, synthetic construct
  source 1..21: mol_type = other DNA
  modified_base 1: mod_base = OTHER; note = adenosine-3'-phosphate
  modified_base 2: mod_base = OTHER; note = guanosine-3'-phosphate
  modified_base 3: mod_base = OTHER; note = adenosine-3'-phosphate
  modified_base 4: mod_base = OTHER; note = adenosine-3'-phosphate
  modified_base 5: mod_base = OTHER; note = adenosine-3'-phosphate
  modified_base 6: mod_base = OTHER; note = cytidine-3'-phosphate
  modified_base 7: mod_base = OTHER; note = cytidine-3'-phosphate
  modified_base 8: mod_base = OTHER; note = guanosine-3'-phosphate
  modified_base 9: mod_base = OTHER; note = uridine-3'-phosphate
  modified_base 10: mod_base = OTHER; note = guanosine-3'-phosphate
  modified_base 11: mod_base = OTHER; note = adenosine-3'-phosphate
  modified_base 12: mod_base = OTHER; note = guanosine-3'-phosphate
  modified_base 13: mod_base = OTHER; note = adenosine-3'-phosphate
  modified_base 14: mod_base = OTHER; note = guanosine-3'-phosphate
  modified_base 15: mod_base = OTHER; note = cytidine-3'-phosphate
  modified_base 16: mod_base = OTHER; note = uridine-3'-phosphate
  modified_base 17: mod_base = OTHER; note = cytidine-3'-phosphate
  modified_base 18: mod_base = OTHER; note = uridine-3'-phosphate
  modified_base 19: mod_base = OTHER; note = uridine-3'-phosphate
  misc_feature 1..19: note = RNA
  misc_feature 20..21: note = DNA
agaaaccgtgagagctctttt

SEQ ID NO: 516 - DNA, 21 bp, synthetic construct
  source 1..21: mol_type = other DNA
  modified_base 1: mod_base = OTHER; note = guanosine-3'-phosphate
  modified_base 2: mod_base = OTHER; note = cytidine-3'-phosphate
  modified_base 3: mod_base = OTHER; note = uridine-3'-phosphate
  modified_base 4: mod_base = OTHER; note = cytidine-3'-phosphate
  modified_base 5: mod_base = OTHER; note = uridine-3'-phosphate
  modified_base 6: mod_base = OTHER; note = uridine-3'-phosphate
  modified_base 7: mod_base = OTHER; note = cytidine-3'-phosphate
  modified_base 8: mod_base = OTHER; note = guanosine-3'-phosphate
  modified_base 9: mod_base = OTHER; note = guanosine-3'-phosphate
  modified_base 10: mod_base = OTHER; note = guanosine-3'-phosphate
  modified_base 11: mod_base = OTHER; note = guanosine-3'-phosphate
  modified_base 12: mod_base = OTHER; note = cytidine-3'-phosphate
  modified_base 13: mod_base = OTHER; note = cytidine-3'-phosphate
  modified_base 14: mod_base = OTHER; note = cytidine-3'-phosphate
  modified_base 15: mod_base = OTHER; note = uridine-3'-phosphate
  modified_base 16: mod_base = OTHER; note = guanosine-3'-phosphate
  modified_base 17: mod_base = OTHER; note = cytidine-3'-phosphate
  modified_base 18: mod_base = OTHER; note = guanosine-3'-phosphate
  modified_base 19: mod_base = OTHER; note = uridine-3'-phosphate
  misc_feature 1..19: note = RNA
  misc_feature 20..21: note = DNA
gctcttcggggccctgcgttt

SEQ ID NO: 517 - DNA, 21 bp, synthetic construct
  source 1..21: mol_type = other DNA
  modified_base 1: mod_base = OTHER; note = cytidine-3'-phosphate
  modified_base 2: mod_base = OTHER; note = cytidine-3'-phosphate
  modified_base 3: mod_base = OTHER; note = cytidine-3'-phosphate
  modified_base 4: mod_base = OTHER; note = uridine-3'-phosphate
  modified_base 5: mod_base = OTHER; note = guanosine-3'-phosphate
  modified_base 6: mod_base = OTHER; note = cytidine-3'-phosphate
  modified_base 7: mod_base = OTHER; note = guanosine-3'-phosphate
  modified_base 8: mod_base = OTHER; note = uridine-3'-phosphate
  modified_base 9: mod_base = OTHER; note = uridine-3'-phosphate
  modified_base 10: mod_base = OTHER; note = guanosine-3'-phosphate
  modified_base 11: mod_base = OTHER; note = uridine-3'-phosphate
  modified_base 12: mod_base = OTHER; note = guanosine-3'-phosphate
  modified_base 13: mod_base = OTHER; note = cytidine-3'-phosphate
  modified_base 14: mod_base = OTHER; note = adenosine-3'-phosphate
  modified_base 15: mod_base = OTHER; note = guanosine-3'-phosphate
  modified_base 16: mod_base = OTHER; note = adenosine-3'-phosphate
  modified_base 17: mod_base = OTHER; note = cytidine-3'-phosphate
  modified_base 18: mod_base = OTHER; note = uridine-3'-phosphate
  modified_base 19: mod_base = OTHER; note = cytidine-3'-phosphate
  misc_feature 1..19: note = RNA
  misc_feature 20..21: note = DNA
ccctgcgttgtgcagactctt

SEQ ID NO: 518 - DNA, 21 bp, synthetic construct
  source 1..21: mol_type = other DNA
  modified_base 1: mod_base = OTHER; note = uridine-3'-phosphate
  modified_base 2: mod_base = OTHER; note = guanosine-3'-phosphate
  modified_base 3: mod_base = OTHER; note = cytidine-3'-phosphate
  modified_base 4: mod_base = OTHER; note = adenosine-3'-phosphate
  modified_base 5: mod_base = OTHER; note = guanosine-3'-phosphate
  modified_base 6: mod_base = OTHER; note = adenosine-3'-phosphate
  modified_base 7: mod_base = OTHER; note = cytidine-3'-phosphate
  modified_base 8: mod_base = OTHER; note = uridine-3'-phosphate
  modified_base 9: mod_base = OTHER; note = cytidine-3'-phosphate
  modified_base 10: mod_base = OTHER; note = uridine-3'-phosphate
  modified_base 11: mod_base = OTHER; note = adenosine-3'-phosphate
  modified_base 12: mod_base = OTHER; note = uridine-3'-phosphate
  modified_base 13: mod_base = OTHER; note = uridine-3'-phosphate
  modified_base 14: mod_base = OTHER; note = cytidine-3'-phosphate
  modified_base 15: mod_base = OTHER; note = cytidine-3'-phosphate
  modified_base 16: mod_base = OTHER; note = cytidine-3'-phosphate
  modified_base 17: mod_base = OTHER; note = adenosine-3'-phosphate
  modified_base 18: mod_base = OTHER; note = cytidine-3'-phosphate
  modified_base 19: mod_base = OTHER; note = adenosine-3'-phosphate
  misc_feature 1..19: note = RNA
  misc_feature 20..21: note = DNA
tgcagactctattcccacatt

SEQ ID NO: 519 - DNA, 21 bp, synthetic construct
  source 1..21: mol_type = other DNA
  modified_base 1: mod_base = OTHER; note = uridine-3'-phosphate
  modified_base 2: mod_base = OTHER; note = uridine-3'-phosphate
  modified_base 3: mod_base = OTHER; note = cytidine-3'-phosphate
  modified_base 4: mod_base = OTHER; note = cytidine-3'-phosphate
  modified_base 5: mod_base = OTHER; note = cytidine-3'-phosphate
  modified_base 6: mod_base = OTHER; note = adenosine-3'-phosphate
  modified_base 7: mod_base = OTHER; note = cytidine-3'-phosphate
  modified_base 8: mod_base = OTHER; note = adenosine-3'-phosphate
  modified_base 9: mod_base = OTHER; note = guanosine-3'-phosphate
  modified_base 10: mod_base = OTHER; note = cytidine-3'-phosphate
  modified_base 11: mod_base = OTHER; note = uridine-3'-phosphate
  modified_base 12: mod_base = OTHER; note = cytidine-3'-phosphate
  modified_base 13: mod_base = OTHER; note = adenosine-3'-phosphate
  modified_base 14: mod_base = OTHER; note = guanosine-3'-phosphate
  modified_base 15: mod_base = OTHER; note = adenosine-3'-phosphate
  modified_base 16: mod_base = OTHER; note = adenosine-3'-phosphate
  modified_base 17: mod_base = OTHER; note = guanosine-3'-phosphate
  modified_base 18: mod_base = OTHER; note = cytidine-3'-phosphate
  modified_base 19: mod_base = OTHER; note = uridine-3'-phosphate
  misc_feature 1..19: note = RNA
  misc_feature 20..21: note = DNA
ttcccacagctcagaagcttt

SEQ ID NO: 520 - DNA, 21 bp, synthetic construct
  source 1..21: mol_type = other DNA
  modified_base 1: mod_base = OTHER; note = cytidine-3'-phosphate
  modified_base 2: mod_base = OTHER; note = adenosine-3'-phosphate
  modified_base 3: mod_base = OTHER; note = guanosine-3'-phosphate
  modified_base 4: mod_base = OTHER; note = adenosine-3'-phosphate
  modified_base 5: mod_base = OTHER; note = adenosine-3'-phosphate
  modified_base 6: mod_base = OTHER; note = guanosine-3'-phosphate
  modified_base 7: mod_base = OTHER; note = cytidine-3'-phosphate
  modified_base 8: mod_base = OTHER; note = uridine-3'-phosphate
  modified_base 9: mod_base = OTHER; note = guanosine-3'-phosphate
  modified_base 10: mod_base = OTHER; note = guanosine-3'-phosphate
  modified_base 11: mod_base = OTHER; note = guanosine-3'-phosphate
  modified_base 12: mod_base = OTHER; note = adenosine-3'-phosphate
  modified_base 13: mod_base = OTHER; note = guanosine-3'-phosphate
  modified_base 14: mod_base = OTHER; note = uridine-3'-phosphate
  modified_base 15: mod_base = OTHER; note = cytidine-3'-phosphate
  modified_base 16: mod_base = OTHER; note = cytidine-3'-phosphate
  modified_base 17: mod_base = OTHER; note = adenosine-3'-phosphate
  modified_base 18: mod_base = OTHER; note = cytidine-3'-phosphate
  modified_base 19: mod_base = OTHER; note = adenosine-3'-phosphate
  misc_feature 1..19: note = RNA
  misc_feature 20..21: note = DNA
cagaagctgggagtccacatt

SEQ ID NO: 521 - DNA, 21 bp, synthetic construct
  source 1..21: mol_type = other DNA
  modified_base 1: mod_base = OTHER; note = guanosine-3'-phosphate
  modified_base 2: mod_base = OTHER; note = adenosine-3'-phosphate
  modified_base 3: mod_base = OTHER; note = guanosine-3'-phosphate
  modified_base 4: mod_base = OTHER; note = uridine-3'-phosphate
  modified_base 5: mod_base = OTHER; note = cytidine-3'-phosphate
  modified_base 6: mod_base = OTHER; note = cytidine-3'-phosphate
  modified_base 7: mod_base = OTHER; note = adenosine-3'-phosphate
  modified_base 8: mod_base = OTHER; note = cytidine-3'-phosphate
  modified_base 9: mod_base = OTHER; note = adenosine-3'-phosphate
  modified_base 10: mod_base = OTHER; note = cytidine-3'-phosphate
  modified_base 11: mod_base = OTHER; note = cytidine-3'-phosphate
  modified_base 12: mod_base = OTHER; note = guanosine-3'-phosphate
  modified_base 13: mod_base = OTHER; note = cytidine-3'-phosphate
  modified_base 14: mod_base = OTHER; note = uridine-3'-phosphate
  modified_base 15: mod_base = OTHER; note = guanosine-3'-phosphate
  modified_base 16: mod_base = OTHER; note = adenosine-3'-phosphate
  modified_base 17: mod_base = OTHER; note = guanosine-3'-phosphate
  modified_base 18: mod_base = OTHER; note = cytidine-3'-phosphate
  modified_base 19: mod_base = OTHER; note = uridine-3'-phosphate
  misc_feature 1..19: note = RNA
  misc_feature 20..21: note = DNA
gagtccacaccgctgagcttt

SEQ ID NO: 522 - DNA, 21 bp, synthetic construct
  source 1..21: mol_type = other DNA
  modified_base 1: mod_base = OTHER; note = uridine-3'-phosphate
  modified_base 2: mod_base = OTHER; note = guanosine-3'-phosphate
  modified_base 3: mod_base = OTHER; note = adenosine-3'-phosphate
  modified_base 4: mod_base = OTHER; note = guanosine-3'-phosphate
  modified_base 5: mod_base = OTHER; note = cytidine-3'-phosphate
  modified_base 6: mod_base = OTHER; note = uridine-3'-phosphate
  modified_base 7: mod_base = OTHER; note = guanosine-3'-phosphate
  modified_base 8: mod_base = OTHER; note = adenosine-3'-phosphate
  modified_base 9: mod_base = OTHER; note = adenosine-3'-phosphate
  modified_base 10: mod_base = OTHER; note = cytidine-3'-phosphate
  modified_base 11: mod_base = OTHER; note = uridine-3'-phosphate
  modified_base 12: mod_base = OTHER; note = guanosine-3'-phosphate
  modified_base 13: mod_base = OTHER; note = adenosine-3'-phosphate
  modified_base 14: mod_base = OTHER; note = cytidine-3'-phosphate
  modified_base 15: mod_base = OTHER; note = adenosine-3'-phosphate
  modified_base 16: mod_base = OTHER; note = guanosine-3'-phosphate
  modified_base 17: mod_base = OTHER; note = guanosine-3'-phosphate
  modified_base 18: mod_base = OTHER; note = cytidine-3'-phosphate
  modified_base 19: mod_base = OTHER; note = cytidine-3'-phosphate
  misc_feature 1..19: note = RNA
  misc_feature 20..21: note = DNA
tgagctgaactgacaggcctt

SEQ ID NO: 523 - DNA, 21 bp, synthetic construct
  source 1..21: mol_type = other DNA
  modified_base 1: mod_base = OTHER; note = uridine-3'-phosphate
  modified_base 2: mod_base = OTHER; note = guanosine-3'-phosphate
  modified_base 3: mod_base = OTHER; note = adenosine-3'-phosphate
  modified_base 4: mod_base = OTHER; note = cytidine-3'-phosphate
  modified_base 5: mod_base = OTHER; note = adenosine-3'-phosphate
  modified_base 6: mod_base = OTHER; note = guanosine-3'-phosphate
  modified_base 7: mod_base = OTHER; note = guanosine-3'-phosphate
  modified_base 8: mod_base = OTHER; note = cytidine-3'-phosphate
  modified_base 9: mod_base = OTHER; note = cytidine-3'-phosphate
  modified_base 10: mod_base = OTHER; note = adenosine-3'-phosphate
  modified_base 11: mod_base = OTHER; note = guanosine-3'-phosphate
  modified_base 12: mod_base = OTHER; note = uridine-3'-phosphate
  modified_base 13: mod_base = OTHER; note = guanosine-3'-phosphate
  modified_base 14: mod_base = OTHER; note = guanosine-3'-phosphate
  modified_base 15: mod_base = OTHER; note = guanosine-3'-phosphate
  modified_base 16: mod_base = OTHER; note = guanosine-3'-phosphate
  modified_base 17: mod_base = OTHER; note = guanosine-3'-phosphate
  modified_base 18: mod_base = OTHER; note = guanosine-3'-phosphate
  modified_base 19: mod_base = OTHER; note = cytidine-3'-phosphate
  misc_feature 1..19: note = RNA
  misc_feature 20..21: note = DNA
tgacaggccagtggggggctt

SEQ ID NO: 524 - DNA, 21 bp, synthetic construct
  source 1..21: mol_type = other DNA
  modified_base 1: mod_base = OTHER; note = uridine-3'-phosphate
  modified_base 2: mod_base = OTHER; note = guanosine-3'-phosphate
  modified_base 3: mod_base = OTHER; note = guanosine-3'-phosphate
  modified_base 4: mod_base = OTHER; note = guanosine-3'-phosphate
  modified_base 5: mod_base = OTHER; note = guanosine-3'-phosphate
  modified_base 6: mod_base = OTHER; note = guanosine-3'-phosphate
  modified_base 7: mod_base = OTHER; note = guanosine-3'-phosphate
  modified_base 8: mod_base = OTHER; note = cytidine-3'-phosphate
  modified_base 9: mod_base = OTHER; note = adenosine-3'-phosphate
  modified_base 10: mod_base = OTHER; note = guanosine-3'-phosphate
  modified_base 11: mod_base = OTHER; note = guanosine-3'-phosphate
  modified_base 12: mod_base = OTHER; note = guanosine-3'-phosphate
  modified_base 13: mod_base = OTHER; note = guanosine-3'-phosphate
  modified_base 14: mod_base = OTHER; note = uridine-3'-phosphate
  modified_base 15: mod_base = OTHER; note = guanosine-3'-phosphate
  modified_base 16: mod_base = OTHER; note = cytidine-3'-phosphate
  modified_base 17: mod_base = OTHER; note = guanosine-3'-phosphate
  modified_base 18: mod_base = OTHER; note = cytidine-3'-phosphate
  modified_base 19: mod_base = OTHER; note = cytidine-3'-phosphate
  misc_feature 1..19: note = RNA
  misc_feature 20..21: note = DNA
tggggggcaggggtgcgcctt

SEQ ID NO: 525 - DNA, 21 bp, synthetic construct
  source 1..21: mol_type = other DNA
  modified_base 1: mod_base = OTHER; note = guanosine-3'-phosphate
  modified_base 2: mod_base = OTHER; note = guanosine-3'-phosphate
  modified_base 3: mod_base = OTHER; note = uridine-3'-phosphate
  modified_base 4: mod_base = OTHER; note = guanosine-3'-phosphate
  modified_base 5: mod_base = OTHER; note = cytidine-3'-phosphate
  modified_base 6: mod_base = OTHER; note = guanosine-3'-phosphate
  modified_base 7: mod_base = OTHER; note = cytidine-3'-phosphate
  modified_base 8: mod_base = OTHER; note = cytidine-3'-phosphate
  modified_base 9: mod_base = OTHER; note = uridine-3'-phosphate
  modified_base 10: mod_base = OTHER; note = cytidine-3'-phosphate
  modified_base 11: mod_base = OTHER; note = cytidine-3'-phosphate
  modified_base 12: mod_base = OTHER; note = uridine-3'-phosphate
  modified_base 13: mod_base = OTHER; note = cytidine-3'-phosphate
  modified_base 14: mod_base = OTHER; note = uridine-3'-phosphate
  modified_base 15: mod_base = OTHER; note = guanosine-3'-phosphate
  modified_base 16: mod_base = OTHER; note = cytidine-3'-phosphate
  modified_base 17: mod_base = OTHER; note = cytidine-3'-phosphate
  modified_base 18: mod_base = OTHER; note = cytidine-3'-phosphate
  modified_base 19: mod_base = OTHER; note = uridine-3'-phosphate
  misc_feature 1..19: note = RNA
  misc_feature 20..21: note = DNA
ggtgcgcctcctctgcccttt

SEQ ID NO: 526 - DNA, 21 bp, synthetic construct
  source 1..21: mol_type = other DNA
  modified_base 1: mod_base = OTHER; note = uridine-3'-phosphate
  modified_base 2: mod_base = OTHER; note = cytidine-3'-phosphate
  modified_base 3: mod_base = OTHER; note = uridine-3'-phosphate
  modified_base 4: mod_base = OTHER; note = guanosine-3'-phosphate
  modified_base 5: mod_base = OTHER; note = cytidine-3'-phosphate
  modified_base 6: mod_base = OTHER; note = cytidine-3'-phosphate
  modified_base 7: mod_base = OTHER; note = cytidine-3'-phosphate
  modified_base 8: mod_base = OTHER; note = uridine-3'-phosphate
  modified_base 9: mod_base = OTHER; note = guanosine-3'-phosphate
  modified_base 10: mod_base = OTHER; note = cytidine-3'-phosphate
  modified_base 11: mod_base = OTHER; note = cytidine-3'-phosphate
  modified_base 12: mod_base = OTHER; note = cytidine-3'-phosphate
  modified_base 13: mod_base = OTHER; note = adenosine-3'-phosphate
  modified_base 14: mod_base = OTHER; note = cytidine-3'-phosphate
  modified_base 15: mod_base = OTHER; note = cytidine-3'-phosphate
  modified_base 16: mod_base = OTHER; note = adenosine-3'-phosphate
  modified_base 17: mod_base = OTHER; note = guanosine-3'-phosphate
  modified_base 18: mod_base = OTHER; note = cytidine-3'-phosphate
  modified_base 19: mod_base = OTHER; note = cytidine-3'-phosphate
  misc_feature 1..19: note = RNA
  misc_feature 20..21: note = DNA
tctgccctgcccaccagcctt

SEQ ID NO: 527 - DNA, 21 bp, synthetic construct
  source 1..21: mol_type = other DNA
  modified_base 1: mod_base = OTHER; note = adenosine-3'-phosphate
  modified_base 2: mod_base = OTHER; note = cytidine-3'-phosphate
  modified_base 3: mod_base = OTHER; note = cytidine-3'-phosphate
  modified_base 4: mod_base = OTHER; note = adenosine-3'-phosphate
  modified_base 5: mod_base = OTHER; note = guanosine-3'-phosphate
  modified_base 6: mod_base = OTHER; note = cytidine-3'-phosphate
  modified_base 7: mod_base = OTHER; note = cytidine-3'-phosphate
  modified_base 8: mod_base = OTHER; note = uridine-3'-phosphate
  modified_base 9: mod_base = OTHER; note = guanosine-3'-phosphate
  modified_base 10: mod_base = OTHER; note = uridine-3'-phosphate
  modified_base 11: mod_base = OTHER; note = guanosine-3'-phosphate
  modified_base 12: mod_base = OTHER; note = adenosine-3'-phosphate
  modified_base 13: mod_base = OTHER; note = uridine-3'-phosphate
  modified_base 14: mod_base = OTHER; note = uridine-3'-phosphate
  modified_base 15: mod_base = OTHER; note = uridine-3'-phosphate
  modified_base 16: mod_base = OTHER; note = guanosine-3'-phosphate
  modified_base 17: mod_base = OTHER; note = adenosine-3'-phosphate
  modified_base 18: mod_base = OTHER; note = uridine-3'-phosphate
  modified_base 19: mod_base = OTHER; note = guanosine-3'-phosphate
  misc_feature 1..19: note = RNA
  misc_feature 20..21: note = DNA
accagcctgtgatttgatgtt

SEQ ID NO: 528 - DNA, 21 bp, synthetic construct
  source 1..21: mol_type = other DNA
  modified_base 1: mod_base = OTHER; note = uridine-3'-phosphate
  modified_base 2: mod_base = OTHER; note = guanosine-3'-phosphate
  modified_base 3: mod_base = OTHER; note = adenosine-3'-phosphate
  modified_base 4: mod_base = OTHER; note = uridine-3'-phosphate
  modified_base 5: mod_base = OTHER; note = uridine-3'-phosphate
  modified_base 6: mod_base = OTHER; note = uridine-3'-phosphate
  modified_base 7: mod_base = OTHER; note = guanosine-3'-phosphate
  modified_base 8: mod_base = OTHER; note = adenosine-3'-phosphate
  modified_base 9: mod_base = OTHER; note = uridine-3'-phosphate
  modified_base 10: mod_base = OTHER; note = guanosine-3'-phosphate
  modified_base 11: mod_base = OTHER; note = guanosine-3'-phosphate
  modified_base 12: mod_base = OTHER; note = guanosine-3'-phosphate
  modified_base 13: mod_base = OTHER; note = guanosine-3'-phosphate
  modified_base 14: mod_base = OTHER; note = uridine-3'-phosphate
  modified_base 15: mod_base = OTHER; note = cytidine-3'-phosphate
  modified_base 16: mod_base = OTHER; note = uridine-3'-phosphate
  modified_base 17: mod_base = OTHER; note = uridine-3'-phosphate
  modified_base 18: mod_base = OTHER; note = cytidine-3'-phosphate
  modified_base 19: mod_base = OTHER; note = adenosine-3'-phosphate
  misc_feature 1..19: note = RNA
  misc_feature 20..21: note = DNA
tgatttgatggggtcttcatt

SEQ ID NO: 529 - DNA, 21 bp, synthetic construct
  source 1..21: mol_type = other DNA
  modified_base 1: mod_base = OTHER; note = guanosine-3'-phosphate
  modified_base 2: mod_base = OTHER; note = uridine-3'-phosphate
  modified_base 3: mod_base = OTHER; note = cytidine-3'-phosphate
  modified_base 4: mod_base = OTHER; note = uridine-3'-phosphate
  modified_base 5: mod_base = OTHER; note = uridine-3'-phosphate
  modified_base 6: mod_base = OTHER; note = cytidine-3'-phosphate
  modified_base 7: mod_base = OTHER; note = adenosine-3'-phosphate
  modified_base 8: mod_base = OTHER; note = uridine-3'-phosphate
  modified_base 9: mod_base = OTHER; note = uridine-3'-phosphate
  modified_base 10: mod_base = OTHER; note = guanosine-3'-phosphate
  modified_base 11: mod_base = OTHER; note = uridine-3'-phosphate
  modified_base 12: mod_base = OTHER; note = cytidine-3'-phosphate
  modified_base 13: mod_base = OTHER; note = cytidine-3'-phosphate
  modified_base 14: mod_base = OTHER; note = adenosine-3'-phosphate
  modified_base 15: mod_base = OTHER; note = guanosine-3'-phosphate
  modified_base 16: mod_base = OTHER; note = adenosine-3'-phosphate
  modified_base 17: mod_base = OTHER; note = adenosine-3'-phosphate
  modified_base 18: mod_base = OTHER; note = adenosine-3'-phosphate
  modified_base 19: mod_base = OTHER; note = uridine-3'-phosphate
  misc_feature 1..19: note = RNA
  misc_feature 20..21: note = DNA
gtcttcattgtccagaaattt

SEQ ID NO: 530 - DNA, 21 bp, synthetic construct
  source 1..21: mol_type = other DNA
  modified_base 1: mod_base = OTHER; note = uridine-3'-phosphate
  modified_base 2: mod_base = OTHER; note = cytidine-3'-phosphate
  modified_base 3: mod_base = OTHER; note = cytidine-3'-phosphate
  modified_base 4: mod_base = OTHER; note = adenosine-3'-phosphate
  modified_base 5: mod_base = OTHER; note = guanosine-3'-phosphate
  modified_base 6: mod_base = OTHER; note = adenosine-3'-phosphate
  modified_base 7: mod_base = OTHER; note = adenosine-3'-phosphate
  modified_base 8: mod_base = OTHER; note = adenosine-3'-phosphate
  modified_base 9: mod_base = OTHER; note = uridine-3'-phosphate
  modified_base 10: mod_base = OTHER; note = adenosine-3'-phosphate
  modified_base 11: mod_base = OTHER; note = cytidine-3'-phosphate
  modified_base 12: mod_base = OTHER; note = cytidine-3'-phosphate
  modified_base 13: mod_base = OTHER; note = uridine-3'-phosphate
  modified_base 14: mod_base = OTHER; note = cytidine-3'-phosphate
  modified_base 15: mod_base = OTHER; note = cytidine-3'-phosphate
  modified_base 16: mod_base = OTHER; note = uridine-3'-phosphate
  modified_base 17: mod_base = OTHER; note = cytidine-3'-phosphate
  modified_base 18: mod_base = OTHER; note = cytidine-3'-phosphate
  modified_base 19: mod_base = OTHER; note = cytidine-3'-phosphate
  misc_feature 1..19: note = RNA
  misc_feature 20..21: note = DNA
tccagaaatacctcctccctt

SEQ ID NO: 531 - DNA, 21 bp, synthetic construct
  source 1..21: mol_type = other DNA
  modified_base 1: mod_base = OTHER; note = uridine-3'-phosphate
  modified_base 2: mod_base = OTHER; note = cytidine-3'-phosphate
  modified_base 3: mod_base = OTHER; note = cytidine-3'-phosphate
  modified_base 4: mod_base = OTHER; note = uridine-3'-phosphate
  modified_base 5: mod_base = OTHER; note = cytidine-3'-phosphate
  modified_base 6: mod_base = OTHER; note = cytidine-3'-phosphate
  modified_base 7: mod_base = OTHER; note = cytidine-3'-phosphate
  modified_base 8: mod_base = OTHER; note = guanosine-3'-phosphate
  modified_base 9: mod_base = OTHER; note = cytidine-3'-phosphate
  modified_base 10: mod_base = OTHER; note = uridine-3'-phosphate
  modified_base 11: mod_base = OTHER; note = guanosine-3'-phosphate
  modified_base 12: mod_base = OTHER; note = adenosine-3'-phosphate
  modified_base 13: mod_base = OTHER; note = cytidine-3'-phosphate
  modified_base 14: mod_base = OTHER; note = uridine-3'-phosphate
  modified_base 15: mod_base = OTHER; note = guanosine-3'-phosphate
  modified_base 16: mod_base = OTHER; note = cytidine-3'-phosphate
  modified_base 17: mod_base = OTHER; note = cytidine-3'-phosphate
  modified_base 18: mod_base = OTHER; note = cytidine-3'-phosphate
  modified_base 19: mod_base = OTHER; note = cytidine-3'-phosphate
  misc_feature 1..19: note = RNA
  misc_feature 20..21: note = DNA
tcctcccgctgactgcccctt

SEQ ID NO: 532 - DNA, 21 bp, synthetic construct
  source 1..21: mol_type = other DNA
  modified_base 1: mod_base = OTHER; note = adenosine-3'-phosphate
  modified_base 2: mod_base = OTHER; note = cytidine-3'-phosphate
  modified_base 3: mod_base = OTHER; note = uridine-3'-phosphate
  modified_base 4: mod_base = OTHER; note = guanosine-3'-phosphate
  modified_base 5: mod_base = OTHER; note = cytidine-3'-phosphate
  modified_base 6: mod_base = OTHER; note = cytidine-3'-phosphate
  modified_base 7: mod_base = OTHER; note = cytidine-3'-phosphate
  modified_base 8: mod_base = OTHER; note = cytidine-3'-phosphate
  modified_base 9: mod_base = OTHER; note = adenosine-3'-phosphate
  modified_base 10: mod_base = OTHER; note = guanosine-3'-phosphate
  modified_base 11: mod_base = OTHER; note = adenosine-3'-phosphate
  modified_base 12: mod_base = OTHER; note = guanosine-3'-phosphate
  modified_base 13: mod_base = OTHER; note = cytidine-3'-phosphate
  modified_base 14: mod_base = OTHER; note = cytidine-3'-phosphate
  modified_base 15: mod_base = OTHER; note = uridine-3'-phosphate
  modified_base 16: mod_base = OTHER; note = guanosine-3'-phosphate
  modified_base 17: mod_base = OTHER; note = adenosine-3'-phosphate
  modified_base 18: mod_base = OTHER; note = adenosine-3'-phosphate
  modified_base 19: mod_base = OTHER; note = adenosine-3'-phosphate
  misc_feature 1..19: note = RNA
  misc_feature 20..21: note = DNA
actgccccagagcctgaaatt

SEQ ID NO: 533 - DNA, 21 bp, synthetic construct
  source 1..21: mol_type = other DNA
  modified_base 1: mod_base = OTHER; note = adenosine-3'-phosphate
  modified_base 2: mod_base = OTHER; note = guanosine-3'-phosphate
  modified_base 3: mod_base = OTHER; note = cytidine-3'-phosphate
  modified_base 4: mod_base = OTHER; note = cytidine-3'-phosphate
  modified_base 5: mod_base = OTHER; note = uridine-3'-phosphate
  modified_base 6: mod_base = OTHER; note = guanosine-3'-phosphate
  modified_base 7: mod_base = OTHER; note = adenosine-3'-phosphate
  modified_base 8: mod_base = OTHER; note = adenosine-3'-phosphate
  modified_base 9: mod_base = OTHER; note = adenosine-3'-phosphate
  modified_base 10: mod_base = OTHER; note = guanosine-3'-phosphate
  modified_base 11: mod_base = OTHER; note = uridine-3'-phosphate
  modified_base 12: mod_base = OTHER; note = cytidine-3'-phosphate
  modified_base 13: mod_base = OTHER; note = uridine-3'-phosphate
  modified_base 14: mod_base = OTHER; note = cytidine-3'-phosphate
  modified_base 15: mod_base = OTHER; note = adenosine-3'-phosphate
  modified_base 16: mod_base = OTHER; note = cytidine-3'-phosphate
  modified_base 17: mod_base = OTHER; note = cytidine-3'-phosphate
  modified_base 18: mod_base = OTHER; note = cytidine-3'-phosphate
  modified_base 19: mod_base = OTHER; note = uridine-3'-phosphate
  misc_feature 1..19: note = RNA
  misc_feature 20..21: note = DNA
agcctgaaagtctcacccttt

SEQ ID NO: 534 - DNA, 21 bp, synthetic construct
  source 1..21: mol_type = other DNA
  modified_base 1: mod_base = OTHER; note = uridine-3'-phosphate
  modified_base 2: mod_base = OTHER; note = cytidine-3'-phosphate
  modified_base 3: mod_base = OTHER; note = adenosine-3'-phosphate
  modified_base 4: mod_base = OTHER; note = cytidine-3'-phosphate
  modified_base 5: mod_base = OTHER; note = cytidine-3'-phosphate
  modified_base 6: mod_base = OTHER; note = cytidine-3'-phosphate
  modified_base 7: mod_base = OTHER; note = uridine-3'-phosphate
  modified_base 8: mod_base = OTHER; note = uridine-3'-phosphate
  modified_base 9: mod_base = OTHER; note = guanosine-3'-phosphate
  modified_base 10: mod_base = OTHER; note = guanosine-3'-phosphate
  modified_base 11: mod_base = OTHER; note = adenosine-3'-phosphate
  modified_base 12: mod_base = OTHER; note = guanosine-3'-phosphate
  modified_base 13: mod_base = OTHER; note = cytidine-3'-phosphate
  modified_base 14: mod_base = OTHER; note = cytidine-3'-phosphate
  modified_base 15: mod_base = OTHER; note = cytidine-3'-phosphate
  modified_base 16: mod_base = OTHER; note = adenosine-3'-phosphate
  modified_base 17: mod_base = OTHER; note = cytidine-3'-phosphate
  modified_base 18: mod_base = OTHER; note = cytidine-3'-phosphate
  modified_base 19: mod_base = OTHER; note = uridine-3'-phosphate
  misc_feature 1..19: note = RNA
  misc_feature 20..21: note = DNA
tcacccttggagcccaccttt

SEQ ID NO: 535 - DNA, 21 bp, synthetic construct
  source 1..21: mol_type = other DNA
  modified_base 1: mod_base = OTHER; note = cytidine-3'-phosphate
  modified_base 2: mod_base = OTHER; note = cytidine-3'-phosphate
  modified_base 3: mod_base = OTHER; note = cytidine-3'-phosphate
  modified_base 4: mod_base = OTHER; note = adenosine-3'-phosphate
  modified_base 5: mod_base = OTHER; note = cytidine-3'-phosphate
  modified_base 6: mod_base = OTHER; note = cytidine-3'-phosphate
  modified_base 7: mod_base = OTHER; note = uridine-3'-phosphate
  modified_base 8: mod_base = OTHER; note = uridine-3'-phosphate
  modified_base 9: mod_base = OTHER; note = guanosine-3'-phosphate
  modified_base 10: mod_base = OTHER; note = guanosine-3'-phosphate
  modified_base 11: mod_base = OTHER; note = adenosine-3'-phosphate
  modified_base 12: mod_base = OTHER; note = adenosine-3'-phosphate
  modified_base 13: mod_base = OTHER; note = uridine-3'-phosphate
  modified_base 14: mod_base = OTHER; note = uridine-3'-phosphate
  modified_base 15: mod_base = OTHER; note = adenosine-3'-phosphate
  modified_base 16: mod_base = OTHER; note = adenosine-3'-phosphate
  modified_base 17: mod_base = OTHER; note = guanosine-3'-phosphate
  modified_base 18: mod_base = OTHER; note = guanosine-3'-phosphate
  modified_base 19: mod_base = OTHER; note = guanosine-3'-phosphate
  misc_feature 1..19: note = RNA
  misc_feature 20..21: note = DNA
cccaccttggaattaagggtt

SEQ ID NO: 536 - DNA, 21 bp, synthetic construct
  source 1..21: mol_type = other DNA
  modified_base 1: mod_base = OTHER; note = guanosine-3'-phosphate
  modified_base 2: mod_base = OTHER; note = adenosine-3'-phosphate
  modified_base 3: mod_base = OTHER; note = adenosine-3'-phosphate
  modified_base 4: mod_base = OTHER; note = uridine-3'-phosphate
  modified_base 5: mod_base = OTHER; note = uridine-3'-phosphate
  modified_base 6: mod_base = OTHER; note = adenosine-3'-phosphate
  modified_base 7: mod_base = OTHER; note = adenosine-3'-phosphate
  modified_base 8: mod_base = OTHER; note = guanosine-3'-phosphate
  modified_base 9: mod_base = OTHER; note = guanosine-3'-phosphate
  modified_base 10: mod_base = OTHER; note = guanosine-3'-phosphate
  modified_base 11: mod_base = OTHER; note = cytidine-3'-phosphate
  modified_base 12: mod_base = OTHER; note = guanosine-3'-phosphate
  modified_base 13: mod_base = OTHER; note = uridine-3'-phosphate
  modified_base 14: mod_base = OTHER; note = guanosine-3'-phosphate
  modified_base 15: mod_base = OTHER; note = cytidine-3'-phosphate
  modified_base 16: mod_base = OTHER; note = cytidine-3'-phosphate
  modified_base 17: mod_base = OTHER; note = uridine-3'-phosphate
  modified_base 18: mod_base = OTHER; note = cytidine-3'-phosphate
  modified_base 19: mod_base = OTHER; note = adenosine-3'-phosphate
  misc_feature 1..19: note = RNA
  misc_feature 20..21: note = DNA
gaattaagggcgtgcctcatt

SEQ ID NO: 537 - DNA, 21 bp, synthetic construct
  source 1..21: mol_type = other DNA
  modified_base 1: mod_base = OTHER; note = uridine-3'-phosphate
  modified_base 2: mod_base = OTHER; note = guanosine-3'-phosphate
  modified_base 3: mod_base = OTHER; note = cytidine-3'-phosphate
  modified_base 4: mod_base = OTHER; note = cytidine-3'-phosphate
  modified_base 5: mod_base = OTHER; note = uridine-3'-phosphate
  modified_base 6: mod_base = OTHER; note = cytidine-3'-phosphate
  modified_base 7: mod_base = OTHER; note = adenosine-3'-phosphate
  modified_base 8: mod_base = OTHER; note = guanosine-3'-phosphate
  modified_base 9: mod_base = OTHER; note = cytidine-3'-phosphate
  modified_base 10: mod_base = OTHER; note = cytidine-3'-phosphate
  modified_base 11: mod_base = OTHER; note = adenosine-3'-phosphate
  modified_base 12: mod_base = OTHER; note = cytidine-3'-phosphate
  modified_base 13: mod_base = OTHER; note = adenosine-3'-phosphate
  modified_base 14: mod_base = OTHER; note = adenosine-3'-phosphate
  modified_base 15: mod_base = OTHER; note = adenosine-3'-phosphate
  modified_base 16: mod_base = OTHER; note = uridine-3'-phosphate
  modified_base 17: mod_base = OTHER; note = guanosine-3'-phosphate
  modified_base 18: mod_base = OTHER; note = uridine-3'-phosphate
  modified_base 19: mod_base = OTHER; note = guanosine-3'-phosphate
  misc_feature 1..19: note = RNA
  misc_feature 20..21: note = DNA
tgcctcagccacaaatgtgtt

SEQ ID NO: 538 - DNA, 21 bp, synthetic construct
  source 1..21: mol_type = other DNA
  modified_base 1: mod_base = OTHER; note = adenosine-3'-phosphate
  modified_base 2: mod_base = OTHER; note = cytidine-3'-phosphate
  modified_base 3: mod_base = OTHER; note = adenosine-3'-phosphate
  modified_base 4: mod_base = OTHER; note = adenosine-3'-phosphate
  modified_base 5: mod_base = OTHER; note = adenosine-3'-phosphate
  modified_base 6: mod_base = OTHER; note = uridine-3'-phosphate
  modified_base 7: mod_base = OTHER; note = guanosine-3'-phosphate
  modified_base 8: mod_base = OTHER; note = uridine-3'-phosphate
  modified_base 9: mod_base = OTHER; note = guanosine-3'-phosphate
  modified_base 10: mod_base = OTHER; note = adenosine-3'-phosphate
  modified_base 11: mod_base = OTHER; note = cytidine-3'-phosphate
  modified_base 12: mod_base = OTHER; note = cytidine-3'-phosphate
  modified_base 13: mod_base = OTHER; note = cytidine-3'-phosphate
  modified_base 14: mod_base = OTHER; note = adenosine-3'-phosphate
  modified_base 15: mod_base = OTHER; note = guanosine-3'-phosphate
  modified_base 16: mod_base = OTHER; note = guanosine-3'-phosphate
  modified_base 17: mod_base = OTHER; note = adenosine-3'-phosphate
  modified_base 18: mod_base = OTHER; note = uridine-3'-phosphate
  modified_base 19: mod_base = OTHER; note = adenosine-3'-phosphate
  misc_feature 1..19: note = RNA
  misc_feature 20..21: note = DNA
acaaatgtgacccaggatatt

SEQ ID NO: 539 - DNA, 21 bp, synthetic construct
  source 1..21: mol_type = other DNA
  modified_base 1: mod_base = OTHER; note = cytidine-3'-phosphate
  modified_base 2: mod_base = OTHER; note = adenosine-3'-phosphate
  modified_base 3: mod_base = OTHER; note = guanosine-3'-phosphate
  modified_base 4: mod_base = OTHER; note = guanosine-3'-phosphate
  modified_base 5: mod_base = OTHER; note = adenosine-3'-phosphate
  modified_base 6: mod_base = OTHER; note = uridine-3'-phosphate
  modified_base 7: mod_base = OTHER; note = adenosine-3'-phosphate
  modified_base 8: mod_base = OTHER; note = cytidine-3'-phosphate
  modified_base 9: mod_base = OTHER; note = adenosine-3'-phosphate
  modified_base 10: mod_base = OTHER; note = guanosine-3'-phosphate
  modified_base 11: mod_base = OTHER; note = adenosine-3'-phosphate
  modified_base 12: mod_base = OTHER; note = guanosine-3'-phosphate
  modified_base 13: mod_base = OTHER; note = uridine-3'-phosphate
  modified_base 14: mod_base = OTHER; note = guanosine-3'-phosphate
  modified_base 15: mod_base = OTHER; note = uridine-3'-phosphate
  modified_base 16: mod_base = OTHER; note = uridine-3'-phosphate
  modified_base 17: mod_base = OTHER; note = guanosine-3'-phosphate
  modified_base 18: mod_base = OTHER; note = cytidine-3'-phosphate
  modified_base 19: mod_base = OTHER; note = uridine-3'-phosphate
  misc_feature 1..19: note = RNA
  misc_feature 20..21: note = DNA
caggatacagagtgttgcttt

SEQ ID NO: 540 - DNA, 21 bp, synthetic construct
  source 1..21: mol_type = other DNA
  modified_base 1: mod_base = OTHER; note = adenosine-3'-phosphate
  modified_base 2: mod_base = OTHER; note = guanosine-3'-phosphate
  modified_base 3: mod_base = OTHER; note = uridine-3'-phosphate
  modified_base 4: mod_base = OTHER; note = guanosine-3'-phosphate
  modified_base 5: mod_base = OTHER; note = uridine-3'-phosphate
  modified_base 6: mod_base = OTHER; note = uridine-3'-phosphate
  modified_base 7: mod_base = OTHER; note = guanosine-3'-phosphate
  modified_base 8: mod_base = OTHER; note = cytidine-3'-phosphate
  modified_base 9: mod_base = OTHER; note = uridine-3'-phosphate
  modified_base 10: mod_base = OTHER; note = guanosine-3'-phosphate
  modified_base 11: mod_base = OTHER; note = uridine-3'-phosphate
  modified_base 12: mod_base = OTHER; note = cytidine-3'-phosphate
  modified_base 13: mod_base = OTHER; note = cytidine-3'-phosphate
  modified_base 14: mod_base = OTHER; note = uridine-3'-phosphate
  modified_base 15: mod_base = OTHER; note = cytidine-3'-phosphate
  modified_base 16: mod_base = OTHER; note = adenosine-3'-phosphate
  modified_base 17: mod_base = OTHER; note = guanosine-3'-phosphate
  modified_base 18: mod_base = OTHER; note = guanosine-3'-phosphate
  modified_base 19: mod_base = OTHER; note = guanosine-3'-phosphate
  misc_feature 1..19: note = RNA
  misc_feature 20..21: note = DNA
agtgttgctgtcctcagggtt

SEQ ID NO: 541 - DNA, 21 bp, synthetic construct
  source 1..21: mol_type = other DNA
  modified_base 1: mod_base = OTHER; note = cytidine-3'-phosphate
  modified_base 2: mod_base = OTHER; note = cytidine-3'-phosphate
  modified_base 3: mod_base = OTHER; note = uridine-3'-phosphate
  modified_base 4: mod_base = OTHER; note = cytidine-3'-phosphate
  modified_base 5: mod_base = OTHER; note = adenosine-3'-phosphate
  modified_base 6: mod_base = OTHER; note = guanosine-3'-phosphate
  modified_base 7: mod_base = OTHER; note = guanosine-3'-phosphate
  modified_base 8: mod_base = OTHER; note = guanosine-3'-phosphate
  modified_base 9: mod_base = OTHER; note = adenosine-3'-phosphate
  modified_base 10: mod_base = OTHER; note = guanosine-3'-phosphate
  modified_base 11: mod_base = OTHER; note = guanosine-3'-phosphate
  modified_base 12: mod_base = OTHER; note = uridine-3'-phosphate
  modified_base 13: mod_base = OTHER; note = cytidine-3'-phosphate
  modified_base 14: mod_base = OTHER; note = cytidine-3'-phosphate
  modified_base 15: mod_base = OTHER; note = guanosine-3'-phosphate
  modified_base 16: mod_base = OTHER; note = adenosine-3'-phosphate
  modified_base 17: mod_base = OTHER; note = uridine-3'-phosphate
  modified_base 18: mod_base = OTHER; note = cytidine-3'-phosphate
  modified_base 19: mod_base = OTHER; note = uridine-3'-phosphate
  misc_feature 1..19: note = RNA
  misc_feature 20..21: note = DNA
cctcagggaggtccgatcttt

SEQ ID NO: 542 - DNA, 21 bp, synthetic construct
  source 1..21: mol_type = other DNA
  modified_base 1: mod_base = OTHER; note = uridine-3'-phosphate
  modified_base 2: mod_base = OTHER; note = cytidine-3'-phosphate
  modified_base 3: mod_base = OTHER; note = cytidine-3'-phosphate
  modified_base 4: mod_base = OTHER; note = guanosine-3'-phosphate
  modified_base 5: mod_base = OTHER; note = adenosine-3'-phosphate
  modified_base 6: mod_base = OTHER; note = uridine-3'-phosphate
  modified_base 7: mod_base = OTHER; note = cytidine-3'-phosphate
  modified_base 8: mod_base = OTHER; note = uridine-3'-phosphate
  modified_base 9: mod_base = OTHER; note = guanosine-3'-phosphate
  modified_base 10: mod_base = OTHER; note = guanosine-3'-phosphate
  modified_base 11: mod_base = OTHER; note = adenosine-3'-phosphate
  modified_base 12: mod_base = OTHER; note = adenosine-3'-phosphate
  modified_base 13: mod_base = OTHER; note = cytidine-3'-phosphate
  modified_base 14: mod_base = OTHER; note = adenosine-3'-phosphate
  modified_base 15: mod_base = OTHER; note = cytidine-3'-phosphate
  modified_base 16: mod_base = OTHER; note = adenosine-3'-phosphate
  modified_base 17: mod_base = OTHER; note = uridine-3'-phosphate
  modified_base 18: mod_base = OTHER; note = adenosine-3'-phosphate
  modified_base 19: mod_base = OTHER; note = uridine-3'-phosphate
  misc_feature 1..19: note = RNA
  misc_feature 20..21: note = DNA
tccgatctggaacacatattt

SEQ ID NO: 543 - DNA, 21 bp, synthetic construct
  source 1..21: mol_type = other DNA
  modified_base 1: mod_base = OTHER; note = adenosine-3'-phosphate
  modified_base 2: mod_base = OTHER; note = cytidine-3'-phosphate
  modified_base 3: mod_base = OTHER; note = adenosine-3'-phosphate
  modified_base 4: mod_base = OTHER; note = cytidine-3'-phosphate
  modified_base 5: mod_base = OTHER; note = adenosine-3'-phosphate
  modified_base 6: mod_base = OTHER; note = uridine-3'-phosphate
  modified_base 7: mod_base = OTHER; note = adenosine-3'-phosphate
  modified_base 8: mod_base = OTHER; note = uridine-3'-phosphate
  modified_base 9: mod_base = OTHER; note = uridine-3'-phosphate
  modified_base 10: mod_base = OTHER; note = guanosine-3'-phosphate
  modified_base 11: mod_base = OTHER; note = guanosine-3'-phosphate
  modified_base 12: mod_base = OTHER; note = adenosine-3'-phosphate
  modified_base 13: mod_base = OTHER; note = adenosine-3'-phosphate
  modified_base 14: mod_base = OTHER; note = uridine-3'-phosphate
  modified_base 15: mod_base = OTHER; note = uridine-3'-phosphate
  modified_base 16: mod_base = OTHER; note = guanosine-3'-phosphate
  modified_base 17: mod_base = OTHER; note = guanosine-3'-phosphate
  modified_base 18: mod_base = OTHER; note = guanosine-3'-phosphate
  modified_base 19: mod_base = OTHER; note = guanosine-3'-phosphate
  misc_feature 1..19: note = RNA
  misc_feature 20..21: note = DNA
acacatattggaattggggtt

SEQ ID NO: 544 - DNA, 21 bp, synthetic construct
  source 1..21: mol_type = other DNA
  modified_base 1: mod_base = OTHER; note = uridine-3'-phosphate
  modified_base 2: mod_base = OTHER; note = uridine-3'-phosphate
  modified_base 3: mod_base = OTHER; note = guanosine-3'-phosphate
  modified_base 4: mod_base = OTHER; note = guanosine-3'-phosphate
  modified_base 5: mod_base = OTHER; note = guanosine-3'-phosphate
  modified_base 6: mod_base = OTHER; note = guanosine-3'-phosphate
  modified_base 7: mod_base = OTHER; note = cytidine-3'-phosphate
  modified_base 8: mod_base = OTHER; note = cytidine-3'-phosphate
  modified_base 9: mod_base = OTHER; note = adenosine-3'-phosphate
  modified_base 10: mod_base = OTHER; note = adenosine-3'-phosphate
  modified_base 11: mod_base = OTHER; note = cytidine-3'-phosphate
  modified_base 12: mod_base = OTHER; note = uridine-3'-phosphate
  modified_base 13: mod_base = OTHER; note = cytidine-3'-phosphate
  modified_base 14: mod_base = OTHER; note = cytidine-3'-phosphate
  modified_base 15: mod_base = OTHER; note = adenosine-3'-phosphate
  modified_base 16: mod_base = OTHER; note = adenosine-3'-phosphate
  modified_base 17: mod_base = OTHER; note = uridine-3'-phosphate
  modified_base 18: mod_base = OTHER; note = adenosine-3'-phosphate
  modified_base 19: mod_base = OTHER; note = uridine-3'-phosphate
  misc_feature 1..19: note = RNA
  misc_feature 20..21: note = DNA
ttggggccaactccaatattt

SEQ ID NO: 545 - DNA, 21 bp, synthetic construct
  source 1..21: mol_type = other DNA
  modified_base 1: mod_base = OTHER; note = adenosine-3'-phosphate
  modified_base 2: mod_base = OTHER; note = cytidine-3'-phosphate
  modified_base 3: mod_base = OTHER; note = uridine-3'-phosphate
  modified_base 4: mod_base = OTHER; note = cytidine-3'-phosphate
  modified_base 5: mod_base = OTHER; note = cytidine-3'-phosphate
  modified_base 6: mod_base = OTHER; note = adenosine-3'-phosphate
  modified_base 7: mod_base = OTHER; note = adenosine-3'-phosphate
  modified_base 8: mod_base = OTHER; note = uridine-3'-phosphate
  modified_base 9: mod_base = OTHER; note = adenosine-3'-phosphate
  modified_base 10: mod_base = OTHER; note = uridine-3'-phosphate
  modified_base 11: mod_base = OTHER; note = adenosine-3'-phosphate
  modified_base 12: mod_base = OTHER; note = guanosine-3'-phosphate
  modified_base 13: mod_base = OTHER; note = guanosine-3'-phosphate
  modified_base 14: mod_base = OTHER; note = guanosine-3'-phosphate
  modified_base 15: mod_base = OTHER; note = uridine-3'-phosphate
  modified_base 16: mod_base = OTHER; note = guanosine-3'-phosphate
  modified_base 17: mod_base = OTHER; note = guanosine-3'-phosphate
  modified_base 18: mod_base = OTHER; note = guanosine-3'-phosphate
  modified_base 19: mod_base = OTHER; note = uridine-3'-phosphate
  misc_feature 1..19: note = RNA
  misc_feature 20..21: note = DNA
actccaatatagggtgggttt

SEQ ID NO: 546 - DNA, 21 bp, synthetic construct
  source 1..21: mol_type = other DNA
  modified_base 1: mod_base = OTHER; note = guanosine-3'-phosphate
  modified_base 2: mod_base = OTHER; note = uridine-3'-phosphate
  modified_base 3: mod_base = OTHER; note = guanosine-3'-phosphate
  modified_base 4: mod_base = OTHER; note = guanosine-3'-phosphate
  modified_base 5: mod_base = OTHER; note = guanosine-3'-phosphate
  modified_base 6: mod_base = OTHER; note = uridine-3'-phosphate
  modified_base 7: mod_base = OTHER; note = adenosine-3'-phosphate
  modified_base 8: mod_base = OTHER; note = adenosine-3'-phosphate
  modified_base 9: mod_base = OTHER; note = guanosine-3'-phosphate
  modified_base 10: mod_base = OTHER; note = guanosine-3'-phosphate
  modified_base 11: mod_base = OTHER; note = cytidine-3'-phosphate
  modified_base 12: mod_base = OTHER; note = cytidine-3'-phosphate
  modified_base 13: mod_base = OTHER; note = uridine-3'-phosphate
  modified_base 14: mod_base = OTHER; note = uridine-3'-phosphate
  modified_base 15: mod_base = OTHER; note = adenosine-3'-phosphate
  modified_base 16: mod_base = OTHER; note = uridine-3'-phosphate
  modified_base 17: mod_base = OTHER; note = adenosine-3'-phosphate
  modified_base 18: mod_base = OTHER; note = adenosine-3'-phosphate
  modified_base 19: mod_base = OTHER; note = uridine-3'-phosphate
  misc_feature 1..19: note = RNA
  misc_feature 20..21: note = DNA
gtgggtaaggccttataattt

SEQ ID NO: 547 - DNA, 21 bp, synthetic construct
  source 1..21: mol_type = other DNA
  modified_base 1: mod_base = OTHER; note = cytidine-3'-phosphate
  modified_base 2: mod_base = OTHER; note = cytidine-3'-phosphate
  modified_base 3: mod_base = OTHER; note = uridine-3'-phosphate
  modified_base 4: mod_base = OTHER; note = uridine-3'-phosphate
  modified_base 5: mod_base = OTHER; note = adenosine-3'-phosphate
  modified_base 6: mod_base = OTHER; note = uridine-3'-phosphate
  modified_base 7: mod_base = OTHER; note = adenosine-3'-phosphate
  modified_base 8: mod_base = OTHER; note = adenosine-3'-phosphate
  modified_base 9: mod_base = OTHER; note = uridine-3'-phosphate
  modified_base 10: mod_base = OTHER; note = guanosine-3'-phosphate
  modified_base 11: mod_base = OTHER; note = uridine-3'-phosphate
  modified_base 12: mod_base = OTHER; note = adenosine-3'-phosphate
  modified_base 13: mod_base = OTHER; note = adenosine-3'-phosphate
  modified_base 14: mod_base = OTHER; note = adenosine-3'-phosphate
  modified_base 15: mod_base = OTHER; note = guanosine-3'-phosphate
  modified_base 16: mod_base = OTHER; note = adenosine-3'-phosphate
  modified_base 17: mod_base = OTHER; note = guanosine-3'-phosphate
  modified_base 18: mod_base = OTHER; note = cytidine-3'-phosphate
  modified_base 19: mod_base = OTHER; note = adenosine-3'-phosphate
  misc_feature 1..19: note = RNA
  misc_feature 20..21: note = DNA
ccttataatgtaaagagcatt

SEQ ID NO: 548 - DNA, 21 bp, synthetic construct
  source 1..21: mol_type = other DNA
  modified_base 1: mod_base = OTHER; note = adenosine-3'-phosphate
  modified_base 2: mod_base = OTHER; note = adenosine-3'-phosphate
  modified_base 3: mod_base = OTHER; note = guanosine-3'-phosphate
  modified_base 4: mod_base = OTHER; note = adenosine-3'-phosphate
  modified_base 5: mod_base = OTHER; note = guanosine-3'-phosphate
  modified_base 6: mod_base = OTHER; note = cytidine-3'-phosphate
  modified_base 7: mod_base = OTHER; note = adenosine-3'-phosphate
  modified_base 8: mod_base = OTHER; note = uridine-3'-phosphate
  modified_base 9: mod_base = OTHER; note = adenosine-3'-phosphate
  modified_base 10: mod_base = OTHER; note = uridine-3'-phosphate
  modified_base 11: mod_base = OTHER; note = adenosine-3'-phosphate
  modified_base 12: mod_base = OTHER; note = adenosine-3'-phosphate
  modified_base 13: mod_base = OTHER; note = uridine-3'-phosphate
  modified_base 14: mod_base = OTHER; note = guanosine-3'-phosphate
  modified_base 15: mod_base = OTHER; note = uridine-3'-phosphate
  modified_base 16: mod_base = OTHER; note = adenosine-3'-phosphate
  modified_base 17: mod_base = OTHER; note = adenosine-3'-phosphate
  modified_base 18: mod_base = OTHER; note = adenosine-3'-phosphate
  modified_base 19: mod_base = OTHER; note = guanosine-3'-phosphate
  misc_feature 1..19: note = RNA
  misc_feature 20..21: note = DNA
aagagcatataatgtaaagtt

SEQ ID NO: 549 - DNA, 21 bp, synthetic construct
  source 1..21: mol_type = other DNA
  modified_base 1: mod_base = OTHER; note = uridine-3'-phosphate
  modified_base 2: mod_base = OTHER; note = adenosine-3'-phosphate
  modified_base 3: mod_base = OTHER; note = adenosine-3'-phosphate
  modified_base 4: mod_base = OTHER; note = uridine-3'-phosphate
  modified_base 5: mod_base = OTHER; note = guanosine-3'-phosphate
  modified_base 6: mod_base = OTHER; note = uridine-3'-phosphate
  modified_base 7: mod_base = OTHER; note = adenosine-3'-phosphate
  modified_base 8: mod_base = OTHER; note = adenosine-3'-phosphate
  modified_base 9: mod_base = OTHER; note = adenosine-3'-phosphate
  modified_base 10: mod_base = OTHER; note = guanosine-3'-phosphate
  modified_base 11: mod_base = OTHER; note = guanosine-3'-phosphate
  modified_base 12: mod_base = OTHER; note = guanosine-3'-phosphate
  modified_base 13: mod_base = OTHER; note = cytidine-3'-phosphate
  modified_base 14: mod_base = OTHER; note = uridine-3'-phosphate
  modified_base 15: mod_base = OTHER; note = uridine-3'-phosphate
  modified_base 16: mod_base = OTHER; note = uridine-3'-phosphate
  modified_base 17: mod_base = OTHER; note = adenosine-3'-phosphate
  modified_base 18: mod_base = OTHER; note = guanosine-3'-phosphate
  modified_base 19: mod_base = OTHER; note = adenosine-3'-phosphate
  misc_feature 1..19: note = RNA
  misc_feature 20..21: note = DNA
taatgtaaagggctttagatt

SEQ ID NO: 550 - DNA, 21 bp, synthetic construct
  source 1..21: mol_type = other DNA
  modified_base 1: mod_base = OTHER; note = uridine-3'-phosphate
  modified_base 2: mod_base = OTHER; note = uridine-3'-phosphate
  modified_base 3: mod_base = OTHER; note = uridine-3'-phosphate
  modified_base 4: mod_base = OTHER; note = adenosine-3'-phosphate
  modified_base 5: mod_base = OTHER; note = guanosine-3'-phosphate
  modified_base 6: mod_base = OTHER; note = adenosine-3'-phosphate
  modified_base 7: mod_base = OTHER; note = guanosine-3'-phosphate
  modified_base 8: mod_base = OTHER; note = uridine-3'-phosphate
  modified_base 9: mod_base = OTHER; note = guanosine-3'-phosphate
  modified_base 10: mod_base = OTHER; note = adenosine-3'-phosphate
  modified_base 11: mod_base = OTHER; note = guanosine-3'-phosphate
  modified_base 12: mod_base = OTHER; note = adenosine-3'-phosphate
  modified_base 13: mod_base = OTHER; note = cytidine-3'-phosphate
  modified_base 14: mod_base = OTHER; note = adenosine-3'-phosphate
  modified_base 15: mod_base = OTHER; note = guanosine-3'-phosphate
  modified_base 16: mod_base = OTHER; note = adenosine-3'-phosphate
  modified_base 17: mod_base = OTHER; note = cytidine-3'-phosphate
  modified_base 18: mod_base = OTHER; note = cytidine-3'-phosphate
  modified_base 19: mod_base = OTHER; note = uridine-3'-phosphate
  misc_feature 1..19: note = RNA
  misc_feature 20..21: note = DNA
tttagagtgagacagaccttt

SEQ ID NO: 551 - DNA, 21 bp, synthetic construct
  source 1..21: mol_type = other DNA
  modified_base 1: mod_base = OTHER; note = adenosine-3'-phosphate
  modified_base 2: mod_base = OTHER; note = cytidine-3'-phosphate
  modified_base 3: mod_base = OTHER; note = adenosine-3'-phosphate
  modified_base 4: mod_base = OTHER; note = guanosine-3'-phosphate
  modified_base 5: mod_base = OTHER; note = adenosine-3'-phosphate
  modified_base 6: mod_base = OTHER; note = cytidine-3'-phosphate
  modified_base 7: mod_base = OTHER; note = cytidine-3'-phosphate
  modified_base 8: mod_base = OTHER; note = uridine-3'-phosphate
  modified_base 9: mod_base = OTHER; note = guanosine-3'-phosphate
  modified_base 10: mod_base = OTHER; note = guanosine-3'-phosphate
  modified_base 11: mod_base = OTHER; note = adenosine-3'-phosphate
  modified_base 12: mod_base = OTHER; note = uridine-3'-phosphate
  modified_base 13: mod_base = OTHER; note = uridine-3'-phosphate
  modified_base 14: mod_base = OTHER; note = adenosine-3'-phosphate
  modified_base 15: mod_base = OTHER; note = adenosine-3'-phosphate
  modified_base 16: mod_base = OTHER; note = adenosine-3'-phosphate
  modified_base 17: mod_base = OTHER; note = adenosine-3'-phosphate
  modified_base 18: mod_base = OTHER; note = uridine-3'-phosphate
  modified_base 19: mod_base = OTHER; note = cytidine-3'-phosphate
  misc_feature 1..19: note = RNA
  misc_feature 20..21: note = DNA
acagacctggattaaaatctt

SEQ ID NO: 552 - DNA, 21 bp, synthetic construct
  source 1..21: mol_type = other DNA
  modified_base 1: mod_base = OTHER; note = uridine-3'-phosphate
  modified_base 2: mod_base = OTHER; note = uridine-3'-phosphate
  modified_base 3: mod_base = OTHER; note = adenosine-3'-phosphate
  modified_base 4: mod_base = OTHER; note = adenosine-3'-phosphate
  modified_base 5: mod_base = OTHER; note = adenosine-3'-phosphate
  modified_base 6: mod_base = OTHER; note = adenosine-3'-phosphate
  modified_base 7: mod_base = OTHER; note = uridine-3'-phosphate
  modified_base 8: mod_base = OTHER; note = cytidine-3'-phosphate
  modified_base 9: mod_base = OTHER; note = uridine-3'-phosphate
  modified_base 10: mod_base = OTHER; note = guanosine-3'-phosphate
  modified_base 11: mod_base = OTHER; note = cytidine-3'-phosphate
  modified_base 12: mod_base = OTHER; note = cytidine-3'-phosphate
  modified_base 13: mod_base = OTHER; note = adenosine-3'-phosphate
  modified_base 14: mod_base = OTHER; note = uridine-3'-phosphate
  modified_base 15: mod_base = OTHER; note = uridine-3'-phosphate
  modified_base 16: mod_base = OTHER; note = uridine-3'-phosphate
  modified_base 17: mod_base = OTHER; note = adenosine-3'-phosphate
  modified_base 18: mod_base = OTHER; note = adenosine-3'-phosphate
  modified_base 19: mod_base = OTHER; note = uridine-3'-phosphate
  misc_feature 1..19: note = RNA
  misc_feature 20..21: note = DNA
ttaaaatctgccatttaattt

SEQ ID NO: 553 - DNA, 21 bp, synthetic construct
  source 1..21: mol_type = other DNA
  modified_base 1: mod_base = OTHER; note = cytidine-3'-phosphate
  modified_base 2: mod_base = OTHER; note = adenosine-3'-phosphate
  modified_base 3: mod_base = OTHER; note = uridine-3'-phosphate
  modified_base 4: mod_base = OTHER; note = uridine-3'-phosphate
  modified_base 5: mod_base = OTHER; note = uridine-3'-phosphate
  modified_base 6: mod_base = OTHER; note = adenosine-3'-phosphate
  modified_base 7: mod_base = OTHER; note = adenosine-3'-phosphate
  modified_base 8: mod_base = OTHER; note = uridine-3'-phosphate
  modified_base 9: mod_base = OTHER; note = uridine-3'-phosphate
  modified_base 10: mod_base = OTHER; note = adenosine-3'-phosphate
  modified_base 11: mod_base = OTHER; note = guanosine-3'-phosphate
  modified_base 12: mod_base = OTHER; note = cytidine-3'-phosphate
  modified_base 13: mod_base = OTHER; note = uridine-3'-phosphate
  modified_base 14: mod_base = OTHER; note = guanosine-3'-phosphate
  modified_base 15: mod_base = OTHER; note = cytidine-3'-phosphate
  modified_base 16: mod_base = OTHER; note = adenosine-3'-phosphate
  modified_base 17: mod_base = OTHER; note = uridine-3'-phosphate
  modified_base 18: mod_base = OTHER; note = adenosine-3'-phosphate
  modified_base 19: mod_base = OTHER; note = uridine-3'-phosphate
  misc_feature 1..19: note = RNA
  misc_feature 20..21: note = DNA
catttaattagctgcatattt

SEQ ID NO: 554 - DNA, 21 bp, synthetic construct
  source 1..21: mol_type = other DNA
  modified_base 1: mod_base = OTHER; note = cytidine-3'-phosphate
  modified_base 2: mod_base = OTHER; note = uridine-3'-phosphate
  modified_base 3: mod_base = OTHER; note = uridine-3'-phosphate
  modified_base 4: mod_base = OTHER; note = adenosine-3'-phosphate
  modified_base 5: mod_base = OTHER; note = guanosine-3'-phosphate
  modified_base 6: mod_base = OTHER; note = guanosine-3'-phosphate
  modified_base 7: mod_base = OTHER; note = guanosine-3'-phosphate
  modified_base 8: mod_base = OTHER; note = uridine-3'-phosphate
  modified_base 9: mod_base = OTHER; note = adenosine-3'-phosphate
  modified_base 10: mod_base = OTHER; note = cytidine-3'-phosphate
  modified_base 11: mod_base = OTHER; note = adenosine-3'-phosphate
  modified_base 12: mod_base = OTHER; note = guanosine-3'-phosphate
  modified_base 13: mod_base = OTHER; note = cytidine-3'-phosphate
  modified_base 14: mod_base = OTHER; note = adenosine-3'-phosphate
  modified_base 15: mod_base = OTHER; note = cytidine-3'-phosphate
  modified_base 16: mod_base = OTHER; note = uridine-3'-phosphate
  modified_base 17: mod_base = OTHER; note = uridine-3'-phosphate
  modified_base 18: mod_base = OTHER; note = adenosine-3'-phosphate
  modified_base 19: mod_base = OTHER; note = adenosine-3'-phosphate
  misc_feature 1..19: note = RNA
  misc_feature 20..21: note = DNA
cttagggtacagcacttaatt

SEQ ID NO: 555 - DNA, 21 bp, synthetic construct
  source 1..21: mol_type = other DNA
  modified_base 1: mod_base = OTHER; note = cytidine-3'-phosphate
  modified_base 2: mod_base = OTHER; note = adenosine-3'-phosphate
  modified_base 3: mod_base = OTHER; note = guanosine-3'-phosphate
  modified_base 4: mod_base = OTHER; note = cytidine-3'-phosphate
  modified_base 5: mod_base = OTHER; note = adenosine-3'-phosphate
  modified_base 6: mod_base = OTHER; note = cytidine-3'-phosphate
  modified_base 7: mod_base = OTHER; note = uridine-3'-phosphate
  modified_base 8: mod_base = OTHER; note = uridine-3'-phosphate
  modified_base 9: mod_base = OTHER; note = adenosine-3'-phosphate
  modified_base 10: mod_base = OTHER; note = adenosine-3'-phosphate
  modified_base 11: mod_base = OTHER; note = cytidine-3'-phosphate
  modified_base 12: mod_base = OTHER; note = guanosine-3'-phosphate
  modified_base 13: mod_base = OTHER; note = cytidine-3'-phosphate
  modified_base 14: mod_base = OTHER; note = adenosine-3'-phosphate
  modified_base 15: mod_base = OTHER; note = adenosine-3'-phosphate
  modified_base 16: mod_base = OTHER; note = uridine-3'-phosphate
  modified_base 17: mod_base = OTHER; note = cytidine-3'-phosphate
  modified_base 18: mod_base = OTHER; note = uridine-3'-phosphate
  modified_base 19: mod_base = OTHER; note = guanosine-3'-phosphate
  misc_feature 1..19: note = RNA
  misc_feature 20..21: note = DNA
cagcacttaacgcaatctgtt

SEQ ID NO: 556 - DNA, 21 bp, synthetic construct
  source 1..21: mol_type = other DNA
  modified_base 1: mod_base = OTHER; note = guanosine-3'-phosphate
  modified_base 2: mod_base = OTHER; note = cytidine-3'-phosphate
  modified_base 3: mod_base = OTHER; note = adenosine-3'-phosphate
  modified_base 4: mod_base = OTHER; note = adenosine-3'-phosphate
  modified_base 5: mod_base = OTHER; note = uridine-3'-phosphate
  modified_base 6: mod_base = OTHER; note = cytidine-3'-phosphate
  modified_base 7: mod_base = OTHER; note = uridine-3'-phosphate
  modified_base 8: mod_base = OTHER; note = guanosine-3'-phosphate
  modified_base 9: mod_base = OTHER; note = cytidine-3'-phosphate
  modified_base 10: mod_base = OTHER; note = cytidine-3'-phosphate
  modified_base 11: mod_base = OTHER; note = uridine-3'-phosphate
  modified_base 12: mod_base = OTHER; note = cytidine-3'-phosphate
  modified_base 13: mod_base = OTHER; note = adenosine-3'-phosphate
  modified_base 14: mod_base = OTHER; note = adenosine-3'-phosphate
  modified_base 15: mod_base = OTHER; note = uridine-3'-phosphate
  modified_base 16: mod_base = OTHER; note = uridine-3'-phosphate
  modified_base 17: mod_base = OTHER; note = uridine-3'-phosphate
  modified_base 18: mod_base = OTHER; note = cytidine-3'-phosphate
  modified_base 19: mod_base = OTHER; note = uridine-3'-phosphate
  misc_feature 1..19: note = RNA
  misc_feature 20..21: note = DNA
gcaatctgcctcaatttcttt

SEQ ID NO: 557 - DNA, 21 bp, synthetic construct
  source 1..21: mol_type = other DNA
  modified_base 1: mod_base = OTHER; note = adenosine-3'-phosphate
  modified_base 2: mod_base = OTHER; note = adenosine-3'-phosphate
  modified_base 3: mod_base = OTHER; note = uridine-3'-phosphate
  modified_base 4: mod_base = OTHER; note = uridine-3'-phosphate
  modified_base 5: mod_base = OTHER; note = uridine-3'-phosphate
  modified_base 6: mod_base = OTHER; note = cytidine-3'-phosphate
  modified_base 7: mod_base = OTHER; note = uridine-3'-phosphate
  modified_base 8: mod_base = OTHER; note = uridine-3'-phosphate
  modified_base 9: mod_base = OTHER; note = cytidine-3'-phosphate
  modified_base 10: mod_base = OTHER; note = adenosine-3'-phosphate
  modified_base 11: mod_base = OTHER; note = uridine-3'-phosphate
  modified_base 12: mod_base = OTHER; note = cytidine-3'-phosphate
  modified_base 13: mod_base = OTHER; note = uridine-3'-phosphate
  modified_base 14: mod_base = OTHER; note = guanosine-3'-phosphate
  modified_base 15: mod_base = OTHER; note = uridine-3'-phosphate
  modified_base 16: mod_base = OTHER; note = cytidine-3'-phosphate
  modified_base 17: mod_base = OTHER; note = adenosine-3'-phosphate
  modified_base 18: mod_base = OTHER; note = adenosine-3'-phosphate
  modified_base 19: mod_base = OTHER; note = adenosine-3'-phosphate
  misc_feature 1..19: note = RNA
  misc_feature 20..21: note = DNA
aatttcttcatctgtcaaatt

SEQ ID NO: 558 - DNA, 21 bp, synthetic construct
  source 1..21: mol_type = other DNA
  modified_base 1: mod_base = OTHER; note = guanosine-3'-phosphate
  modified_base 2: mod_base = OTHER; note = adenosine-3'-phosphate
  modified_base 3: mod_base = OTHER; note = adenosine-3'-phosphate
  modified_base 4: mod_base = OTHER; note = cytidine-3'-phosphate
  modified_base 5: mod_base = OTHER; note = cytidine-3'-phosphate
  modified_base 6: mod_base = OTHER; note = adenosine-3'-phosphate
  modified_base 7: mod_base = OTHER; note = adenosine-3'-phosphate
  modified_base 8: mod_base = OTHER; note = uridine-3'-phosphate
  modified_base 9: mod_base = OTHER; note = uridine-3'-phosphate
  modified_base 10: mod_base = OTHER; note = cytidine-3'-phosphate
  modified_base 11: mod_base = OTHER; note = uridine-3'-phosphate
  modified_base 12: mod_base = OTHER; note = guanosine-3'-phosphate
  modified_base 13: mod_base = OTHER; note = cytidine-3'-phosphate
  modified_base 14: mod_base = OTHER; note = uridine-3'-phosphate
  modified_base 15: mod_base = OTHER; note = uridine-3'-phosphate
  modified_base 16: mod_base = OTHER; note = guanosine-3'-phosphate
  modified_base 17: mod_base = OTHER; note = guanosine-3'-phosphate
  modified_base 18: mod_base = OTHER; note = cytidine-3'-phosphate
  modified_base 19: mod_base = OTHER; note = uridine-3'-phosphate
  misc_feature 1..19: note = RNA
  misc_feature 20..21: note = DNA
gaaccaattctgcttggcttt

SEQ ID NO: 559 - DNA, 21 bp, synthetic construct
  source 1..21: mol_type = other DNA
  modified_base 1: mod_base = OTHER; note = uridine-3'-phosphate
  modified_base 2: mod_base = OTHER; note = uridine-3'-phosphate
  modified_base 3: mod_base = OTHER; note = guanosine-3'-phosphate
  modified_base 4: mod_base = OTHER; note = guanosine-3'-phosphate
  modified_base 5: mod_base = OTHER; note = cytidine-3'-phosphate
  modified_base 6: mod_base = OTHER; note = uridine-3'-phosphate
  modified_base 7: mod_base = OTHER; note = adenosine-3'-phosphate
  modified_base 8: mod_base = OTHER; note = cytidine-3'-phosphate
  modified_base 9: mod_base = OTHER; note = adenosine-3'-phosphate
  modified_base 10: mod_base = OTHER; note = guanosine-3'-phosphate
  modified_base 11: mod_base = OTHER; note = adenosine-3'-phosphate
  modified_base 12: mod_base = OTHER; note = adenosine-3'-phosphate
  modified_base 13: mod_base = OTHER; note = uridine-3'-phosphate
  modified_base 14: mod_base = OTHER; note = uridine-3'-phosphate
  modified_base 15: mod_base = OTHER; note = adenosine-3'-phosphate
  modified_base 16: mod_base = OTHER; note = uridine-3'-phosphate
  modified_base 17: mod_base = OTHER; note = uridine-3'-phosphate
  modified_base 18: mod_base = OTHER; note = guanosine-3'-phosphate
  modified_base 19: mod_base = OTHER; note = uridine-3'-phosphate
  misc_feature 1..19: note = RNA
  misc_feature 20..21: note = DNA
ttggctacagaattattgttt

SEQ ID NO: 560 - DNA, 21 bp, synthetic construct
  source 1..21: mol_type = other DNA
  modified_base 1: mod_base = OTHER; note = adenosine-3'-phosphate
  modified_base 2: mod_base = OTHER; note = uridine-3'-phosphate
  modified_base 3: mod_base = OTHER; note = uridine-3'-phosphate
  modified_base 4: mod_base = OTHER; note = adenosine-3'-phosphate
  modified_base 5: mod_base = OTHER; note = uridine-3'-phosphate
  modified_base 6: mod_base = OTHER; note = uridine-3'-phosphate
  modified_base 7: mod_base = OTHER; note = guanosine-3'-phosphate
  modified_base 8: mod_base = OTHER; note = uridine-3'-phosphate
  modified_base 9: mod_base = OTHER; note = guanosine-3'-phosphate
  modified_base 10: mod_base = OTHER; note = adenosine-3'-phosphate
  modified_base 11: mod_base = OTHER; note = guanosine-3'-phosphate
  modified_base 12: mod_base = OTHER; note = guanosine-3'-phosphate
  modified_base 13: mod_base = OTHER; note = adenosine-3'-phosphate
  modified_base 14: mod_base = OTHER; note = uridine-3'-phosphate
  modified_base 15: mod_base = OTHER; note = adenosine-3'-phosphate
  modified_base 16: mod_base = OTHER; note = adenosine-3'-phosphate
  modified_base 17: mod_base = OTHER; note = adenosine-3'-phosphate
  modified_base 18: mod_base = OTHER; note = adenosine-3'-phosphate
  modified_base 19: mod_base = OTHER; note = uridine-3'-phosphate
  misc_feature 1..19: note = RNA
  misc_feature 20..21: note = DNA
attattgtgaggataaaattt

SEQ ID NO: 561 - DNA, 21 bp, synthetic construct
  source 1..21: mol_type = other DNA
  modified_base 1: mod_base = OTHER; note = adenosine-3'-phosphate
  modified_base 2: mod_base = OTHER; note = guanosine-3'-phosphate
  modified_base 3: mod_base = OTHER; note = guanosine-3'-phosphate
  modified_base 4: mod_base = OTHER; note = adenosine-3'-phosphate
  modified_base 5: mod_base = OTHER; note = uridine-3'-phosphate
  modified_base 6: mod_base = OTHER; note = adenosine-3'-phosphate
  modified_base 7: mod_base = OTHER; note = adenosine-3'-phosphate
  modified_base 8: mod_base = OTHER; note = adenosine-3'-phosphate
  modified_base 9: mod_base = OTHER; note = adenosine-3'-phosphate
  modified_base 10: mod_base = OTHER; note = uridine-3'-phosphate
  modified_base 11: mod_base = OTHER; note = cytidine-3'-phosphate
  modified_base 12: mod_base = OTHER; note = adenosine-3'-phosphate
  modified_base 13: mod_base = OTHER; note = uridine-3'-phosphate
  modified_base 14: mod_base = OTHER; note = adenosine-3'-phosphate
  modified_base 15: mod_base = OTHER; note = uridine-3'-phosphate
  modified_base 16: mod_base = OTHER; note = adenosine-3'-phosphate
  modified_base 17: mod_base = OTHER; note = uridine-3'-phosphate
  modified_base 18: mod_base = OTHER; note = adenosine-3'-phosphate
  modified_base 19: mod_base = OTHER; note = adenosine-3'-phosphate
  misc_feature 1..19: note = RNA
  misc_feature 20..21: note = DNA
aggataaaatcatatataatt

SEQ ID NO: 562 - DNA, 21 bp, synthetic construct
  source 1..21: mol_type = other DNA
  modified_base 1: mod_base = OTHER; note = uridine-3'-phosphate
  modified_base 2: mod_base = OTHER; note = adenosine-3'-phosphate
  modified_base 3: mod_base = OTHER; note = uridine-3'-phosphate
  modified_base 4: mod_base = OTHER; note = adenosine-3'-phosphate
  modified_base 5: mod_base = OTHER; note = uridine-3'-phosphate
  modified_base 6: mod_base = OTHER; note = adenosine-3'-phosphate
  modified_base 7: mod_base = OTHER; note = adenosine-3'-phosphate
  modified_base 8: mod_base = OTHER; note = adenosine-3'-phosphate
  modified_base 9: mod_base = OTHER; note = adenosine-3'-phosphate
  modified_base 10: mod_base = OTHER; note = uridine-3'-phosphate
  modified_base 11: mod_base = OTHER; note = guanosine-3'-phosphate
  modified_base 12: mod_base = OTHER; note = cytidine-3'-phosphate
  modified_base 13: mod_base = OTHER; note = cytidine-3'-phosphate
  modified_base 14: mod_base = OTHER; note = cytidine-3'-phosphate
  modified_base 15: mod_base = OTHER; note = adenosine-3'-phosphate
  modified_base 16: mod_base = OTHER; note = guanosine-3'-phosphate
  modified_base 17: mod_base = OTHER; note = cytidine-3'-phosphate
  modified_base 18: mod_base = OTHER; note = adenosine-3'-phosphate
  modified_base 19: mod_base = OTHER; note = uridine-3'-phosphate
  misc_feature 1..19: note = RNA
  misc_feature 20..21: note = DNA
tatataaaatgcccagcattt

SEQ ID NO: 563 - DNA, 21 bp, synthetic construct
  source 1..21: mol_type = other DNA
  modified_base 1: mod_base = OTHER; note = cytidine-3'-phosphate
  modified_base 2: mod_base = OTHER; note = guanosine-3'-phosphate
  modified_base 3: mod_base = OTHER; note = cytidine-3'-phosphate
  modified_base 4: mod_base = OTHER; note = adenosine-3'-phosphate
  modified_base 5: mod_base = OTHER; note = uridine-3'-phosphate
  modified_base 6: mod_base = OTHER; note = cytidine-3'-phosphate
  modified_base 7: mod_base = OTHER; note = uridine-3'-phosphate
  modified_base 8: mod_base = OTHER; note = guanosine-3'-phosphate
  modified_base 9: mod_base = OTHER; note = cytidine-3'-phosphate
  modified_base 10: mod_base = OTHER; note = adenosine-3'-phosphate
  modified_base 11: mod_base = OTHER; note = guanosine-3'-phosphate
  modified_base 12: mod_base = OTHER; note = cytidine-3'-phosphate
  modified_base 13: mod_base = OTHER; note = cytidine-3'-phosphate
  modified_base 14: mod_base = OTHER; note = cytidine-3'-phosphate
  modified_base 15: mod_base = OTHER; note = uridine-3'-phosphate
  modified_base 16: mod_base = OTHER; note = guanosine-3'-phosphate
  modified_base 17: mod_base = OTHER; note = cytidine-3'-phosphate
  modified_base 18: mod_base = OTHER; note = cytidine-3'-phosphate
  modified_base 19: mod_base = OTHER; note = uridine-3'-phosphate
  misc_feature 1..19: note = RNA
  misc_feature 20..21: note = DNA
cgcatctgcagccctgccttt

SEQ ID NO: 564 - DNA, 21 bp, synthetic construct
  source 1..21: mol_type = other DNA
  modified_base 1: mod_base = OTHER; note = adenosine-3'-phosphate
  modified_base 2: mod_base = OTHER; note = guanosine-3'-phosphate
  modified_base 3: mod_base = OTHER; note = cytidine-3'-phosphate
  modified_base 4: mod_base = OTHER; note = uridine-3'-phosphate
  modified_base 5: mod_base = OTHER; note = guanosine-3'-phosphate
  modified_base 6: mod_base = OTHER; note = guanosine-3'-phosphate
  modified_base 7: mod_base = OTHER; note = guanosine-3'-phosphate
  modified_base 8: mod_base = OTHER; note = cytidine-3'-phosphate
  modified_base 9: mod_base = OTHER; note = cytidine-3'-phosphate
  modified_base 10: mod_base = OTHER; note = uridine-3'-phosphate
  modified_base 11: mod_base = OTHER; note = cytidine-3'-phosphate
  modified_base 12: mod_base = OTHER; note = guanosine-3'-phosphate
  modified_base 13: mod_base = OTHER; note = cytidine-3'-phosphate
  modified_base 14: mod_base = OTHER; note = adenosine-3'-phosphate
  modified_base 15: mod_base = OTHER; note = uridine-3'-phosphate
  modified_base 16: mod_base = OTHER; note = cytidine-3'-phosphate
  modified_base 17: mod_base = OTHER; note = uridine-3'-phosphate
  modified_base 18: mod_base = OTHER; note = guanosine-3'-phosphate
  modified_base 19: mod_base = OTHER; note = cytidine-3'-phosphate
  misc_feature 1..19: note = RNA
  misc_feature 20..21: note = DNA
agctgggcctcgcatctgctt

SEQ ID NO: 565 - DNA, 21 bp, synthetic construct
  source 1..21: mol_type = other DNA
  modified_base 1: mod_base = OTHER; note = adenosine-3'-phosphate
  modified_base 2: mod_base = OTHER; note = cytidine-3'-phosphate
  modified_base 3: mod_base = OTHER; note = guanosine-3'-phosphate
  modified_base 4: mod_base = OTHER; note = cytidine-3'-phosphate
  modified_base 5: mod_base = OTHER; note = guanosine-3'-phosphate
  modified_base 6: mod_base = OTHER; note = adenosine-3'-phosphate
  modified_base 7: mod_base = OTHER; note = guanosine-3'-phosphate
  modified_base 8: mod_base = OTHER; note = guanosine-3'-phosphate
  modified_base 9: mod_base = OTHER; note = uridine-3'-phosphate
  modified_base 10: mod_base = OTHER; note = adenosine-3'-phosphate
  modified_base 11: mod_base = OTHER; note = cytidine-3'-phosphate
  modified_base 12: mod_base = OTHER; note = adenosine-3'-phosphate
  modified_base 13: mod_base = OTHER; note = guanosine-3'-phosphate
  modified_base 14: mod_base = OTHER; note = cytidine-3'-phosphate
  modified_base 15: mod_base = OTHER; note = uridine-3'-phosphate
  modified_base 16: mod_base = OTHER; note = guanosine-3'-phosphate
  modified_base 17: mod_base = OTHER; note = guanosine-3'-phosphate
  modified_base 18: mod_base = OTHER; note = guanosine-3'-phosphate
  modified_base 19: mod_base = OTHER; note = cytidine-3'-phosphate
  misc_feature 1..19: note = RNA
  misc_feature 20..21: note = DNA
acgcgaggtacagctgggctt

SEQ ID NO: 566 - DNA, 21 bp, synthetic construct
  source 1..21: mol_type = other DNA
  modified_base 1: mod_base = OTHER; note = guanosine-3'-phosphate
  modified_base 2: mod_base = OTHER; note = adenosine-3'-phosphate
  modified_base 3: mod_base = OTHER; note = cytidine-3'-phosphate
  modified_base 4: mod_base = OTHER; note = cytidine-3'-phosphate
  modified_base 5: mod_base = OTHER; note = cytidine-3'-phosphate
  modified_base 6: mod_base = OTHER; note = guanosine-3'-phosphate
  modified_base 7: mod_base = OTHER; note = guanosine-3'-phosphate
  modified_base 8: mod_base = OTHER; note = guanosine-3'-phosphate
  modified_base 9: mod_base = OTHER; note = adenosine-3'-phosphate
  modified_base 10: mod_base = OTHER; note = cytidine-3'-phosphate
  modified_base 11: mod_base = OTHER; note = adenosine-3'-phosphate
  modified_base 12: mod_base = OTHER; note = cytidine-3'-phosphate
  modified_base 13: mod_base = OTHER; note = guanosine-3'-phosphate
  modified_base 14: mod_base = OTHER; note = cytidine-3'-phosphate
  modified_base 15: mod_base = OTHER; note = guanosine-3'-phosphate
  modified_base 16: mod_base = OTHER; note = adenosine-3'-phosphate
  modified_base 17: mod_base = OTHER; note = guanosine-3'-phosphate
  modified_base 18: mod_base = OTHER; note = guanosine-3'-phosphate
  modified_base 19: mod_base = OTHER; note = uridine-3'-phosphate
  misc_feature 1..19: note = RNA
  misc_feature 20..21: note = DNA
gacccgggacacgcgaggttt

SEQ ID NO: 567 - DNA, 21 bp, synthetic construct
  source 1..21: mol_type = other DNA
  modified_base 1: mod_base = OTHER; note = uridine-3'-phosphate
  modified_base 2: mod_base = OTHER; note = cytidine-3'-phosphate
  modified_base 3: mod_base = OTHER; note = uridine-3'-phosphate
  modified_base 4: mod_base = OTHER; note = cytidine-3'-phosphate
  modified_base 5: mod_base = OTHER; note = cytidine-3'-phosphate
  modified_base 6: mod_base = OTHER; note = guanosine-3'-phosphate
  modified_base 7: mod_base = OTHER; note = adenosine-3'-phosphate
  modified_base 8: mod_base = OTHER; note = cytidine-3'-phosphate
  modified_base 9: mod_base = OTHER; note = uridine-3'-phosphate
  modified_base 10: mod_base = OTHER; note = cytidine-3'-phosphate
  modified_base 11: mod_base = OTHER; note = cytidine-3'-phosphate
  modified_base 12: mod_base = OTHER; note = cytidine-3'-phosphate
  modified_base 13: mod_base = OTHER; note = guanosine-3'-phosphate
  modified_base 14: mod_base = OTHER; note = adenosine-3'-phosphate
  modified_base 15: mod_base = OTHER; note = cytidine-3'-phosphate
  modified_base 16: mod_base = OTHER; note = cytidine-3'-phosphate
  modified_base 17: mod_base = OTHER; note = cytidine-3'-phosphate
  modified_base 18: mod_base = OTHER; note = guanosine-3'-phosphate
  modified_base 19: mod_base = OTHER; note = guanosine-3'-phosphate
  misc_feature 1..19: note = RNA
  misc_feature 20..21: note = DNA
tctccgactcccgacccggtt

SEQ ID NO: 568 - DNA, 21 bp, synthetic construct
  source 1..21: mol_type = other DNA
  modified_base 1: mod_base = OTHER; note = cytidine-3'-phosphate
  modified_base 2: mod_base = OTHER; note = cytidine-3'-phosphate
  modified_base 3: mod_base = OTHER; note = uridine-3'-phosphate
  modified_base 4: mod_base = OTHER; note = guanosine-3'-phosphate
  modified_base 5: mod_base = OTHER; note = cytidine-3'-phosphate
  modified_base 6: mod_base = OTHER; note = adenosine-3'-phosphate
  modified_base 7: mod_base = OTHER; note = cytidine-3'-phosphate
  modified_base 8: mod_base = OTHER; note = cytidine-3'-phosphate
  modified_base 9: mod_base = OTHER; note = uridine-3'-phosphate
  modified_base 10: mod_base = OTHER; note = guanosine-3'-phosphate
  modified_base 11: mod_base = OTHER; note = cytidine-3'-phosphate
  modified_base 12: mod_base = OTHER; note = guanosine-3'-phosphate
  modified_base 13: mod_base = OTHER; note = uridine-3'-phosphate
  modified_base 14: mod_base = OTHER; note = cytidine-3'-phosphate
  modified_base 15: mod_base = OTHER; note = uridine-3'-phosphate
  modified_base 16: mod_base = OTHER; note = cytidine-3'-phosphate
  modified_base 17: mod_base = OTHER; note = cytidine-3'-phosphate
  modified_base 18: mod_base = OTHER; note = guanosine-3'-phosphate
  modified_base 19: mod_base = OTHER; note = adenosine-3'-phosphate
  misc_feature 1..19: note = RNA
  misc_feature 20..21: note = DNA
cctgcacctgcgtctccgatt

SEQ ID NO: 569 - DNA, 21 bp, synthetic construct
  source 1..21: mol_type = other DNA
  modified_base 1: mod_base = OTHER; note = cytidine-3'-phosphate
  modified_base 2: mod_base = OTHER; note = cytidine-3'-phosphate
  modified_base 3: mod_base = OTHER; note = guanosine-3'-phosphate
  modified_base 4: mod_base = OTHER; note = cytidine-3'-phosphate
  modified_base 5: mod_base = OTHER; note = adenosine-3'-phosphate
  modified_base 6: mod_base = OTHER; note = cytidine-3'-phosphate
  modified_base 7: mod_base = OTHER; note = uridine-3'-phosphate
  modified_base 8: mod_base = OTHER; note = cytidine-3'-phosphate
  modified_base 9: mod_base = OTHER; note = uridine-3'-phosphate
  modified_base 10: mod_base = OTHER; note = cytidine-3'-phosphate
  modified_base 11: mod_base = OTHER; note = cytidine-3'-phosphate
  modified_base 12: mod_base = OTHER; note = uridine-3'-phosphate
  modified_base 13: mod_base = OTHER; note = guanosine-3'-phosphate
  modified_base 14: mod_base = OTHER; note = cytidine-3'-phosphate
  modified_base 15: mod_base = OTHER; note = adenosine-3'-phosphate
  modified_base 16: mod_base = OTHER; note = cytidine-3'-phosphate
  modified_base 17: mod_base = OTHER; note = cytidine-3'-phosphate
  modified_base 18: mod_base = OTHER; note = uridine-3'-phosphate
  modified_base 19: mod_base = OTHER; note = guanosine-3'-phosphate
  misc_feature 1..19: note = RNA
  misc_feature 20..21: note = DNA
ccgcactctcctgcacctgtt

SEQ ID NO: 570 - DNA, 21 bp, synthetic construct
  source 1..21: mol_type = other DNA
  modified_base 1: mod_base = OTHER; note = guanosine-3'-phosphate
  modified_base 2: mod_base = OTHER; note = cytidine-3'-phosphate
  modified_base 3: mod_base = OTHER; note = guanosine-3'-phosphate
  modified_base 4: mod_base = OTHER; note = cytidine-3'-phosphate
  modified_base 5: mod_base = OTHER; note = uridine-3'-phosphate
  modified_base 6: mod_base = OTHER; note = adenosine-3'-phosphate
  modified_base 7: mod_base = OTHER; note = cytidine-3'-phosphate
  modified_base 8: mod_base = OTHER; note = uridine-3'-phosphate
  modified_base 9: mod_base = OTHER; note = uridine-3'-phosphate
  modified_base 10: mod_base = OTHER; note = guanosine-3'-phosphate
  modified_base 11: mod_base = OTHER; note = cytidine-3'-phosphate
  modified_base 12: mod_base = OTHER; note = cytidine-3'-phosphate
  modified_base 13: mod_base = OTHER; note = cytidine-3'-phosphate
  modified_base 14: mod_base = OTHER; note = cytidine-3'-phosphate
  modified_base 15: mod_base = OTHER; note = guanosine-3'-phosphate
  modified_base 16: mod_base = OTHER; note = cytidine-3'-phosphate
  modified_base 17: mod_base = OTHER; note = adenosine-3'-phosphate
  modified_base 18: mod_base = OTHER; note = cytidine-3'-phosphate
  modified_base 19: mod_base = OTHER; note = uridine-3'-phosphate
  misc_feature 1..19: note = RNA
  misc_feature 20..21: note = DNA
gcgctacttgccccgcacttt

SEQ ID NO: 571 - DNA, 21 bp, synthetic construct
  source 1..21: mol_type = other DNA
  modified_base 1: mod_base = OTHER; note = adenosine-3'-phosphate
  modified_base 2: mod_base = OTHER; note = adenosine-3'-phosphate
  modified_base 3: mod_base = OTHER; note = guanosine-3'-phosphate
  modified_base 4: mod_base = OTHER; note = adenosine-3'-phosphate
  modified_base 5: mod_base = OTHER; note = guanosine-3'-phosphate
  modified_base 6: mod_base = OTHER; note = adenosine-3'-phosphate
  modified_base 7: mod_base = OTHER; note = adenosine-3'-phosphate
  modified_base 8: mod_base = OTHER; note = adenosine-3'-phosphate
  modified_base 9: mod_base = OTHER; note = adenosine-3'-phosphate
  modified_base 10: mod_base = OTHER; note = uridine-3'-phosphate
  modified_base 11: mod_base = OTHER; note = guanosine-3'-phosphate
  modified_base 12: mod_base = OTHER; note = cytidine-3'-phosphate
  modified_base 13: mod_base = OTHER; note = guanosine-3'-phosphate
  modified_base 14: mod_base = OTHER; note = cytidine-3'-phosphate
  modified_base 15: mod_base = OTHER; note = uridine-3'-phosphate
  modified_base 16: mod_base = OTHER; note = adenosine-3'-phosphate
  modified_base 17: mod_base = OTHER; note = cytidine-3'-phosphate
  modified_base 18: mod_base = OTHER; note = uridine-3'-phosphate
  modified_base 19: mod_base = OTHER; note = uridine-3'-phosphate
  misc_feature 1..19: note = RNA
  misc_feature 20..21: note = DNA
aagagaaaatgcgctactttt

SEQ ID NO: 572 - DNA, 21 bp, synthetic construct
  source 1..21: mol_type = other DNA
  modified_base 1: mod_base = OTHER; note = cytidine-3'-phosphate
  modified_base 2: mod_base = OTHER; note = uridine-3'-phosphate
  modified_base 3: mod_base = OTHER; note = cytidine-3'-phosphate
  modified_base 4: mod_base = OTHER; note = guanosine-3'-phosphate
  modified_base 5: mod_base = OTHER; note = adenosine-3'-phosphate
  modified_base 6: mod_base = OTHER; note = guanosine-3'-phosphate
  modified_base 7: mod_base = OTHER; note = adenosine-3'-phosphate
  modified_base 8: mod_base = OTHER; note = adenosine-3'-phosphate
  modified_base 9: mod_base = OTHER; note = uridine-3'-phosphate
  modified_base 10: mod_base = OTHER; note = guanosine-3'-phosphate
  modified_base 11: mod_base = OTHER; note = cytidine-3'-phosphate
  modified_base 12: mod_base = OTHER; note = adenosine-3'-phosphate
  modified_base 13: mod_base = OTHER; note = adenosine-3'-phosphate
  modified_base 14: mod_base = OTHER; note = adenosine-3'-phosphate
  modified_base 15: mod_base = OTHER; note = guanosine-3'-phosphate
  modified_base 16: mod_base = OTHER; note = adenosine-3'-phosphate
  modified_base 17: mod_base = OTHER; note = guanosine-3'-phosphate
  modified_base 18: mod_base = OTHER; note = adenosine-3'-phosphate
  modified_base 19: mod_base = OTHER; note = adenosine-3'-phosphate
  misc_feature 1..19: note = RNA
  misc_feature 20..21: note = DNA
ctcgagaatgcaaagagaatt

SEQ ID NO: 573 - DNA, 21 bp, synthetic construct
  source 1..21: mol_type = other DNA
  modified_base 1: mod_base = OTHER; note = guanosine-3'-phosphate
  modified_base 2: mod_base = OTHER; note = guanosine-3'-phosphate
  modified_base 3: mod_base = OTHER; note = cytidine-3'-phosphate
  modified_base 4: mod_base = OTHER; note = uridine-3'-phosphate
  modified_base 5: mod_base = OTHER; note = adenosine-3'-phosphate
  modified_base 6: mod_base = OTHER; note = adenosine-3'-phosphate
  modified_base 7: mod_base = OTHER; note = guanosine-3'-phosphate
  modified_base 8: mod_base = OTHER; note = cytidine-3'-phosphate
  modified_base 9: mod_base = OTHER; note = guanosine-3'-phosphate
  modified_base 10: mod_base = OTHER; note = adenosine-3'-phosphate
  modified_base 11: mod_base = OTHER; note = uridine-3'-phosphate
  modified_base 12: mod_base = OTHER; note = cytidine-3'-phosphate
  modified_base 13: mod_base = OTHER; note = uridine-3'-phosphate
  modified_base 14: mod_base = OTHER; note = cytidine-3'-phosphate
  modified_base 15: mod_base = OTHER; note = guanosine-3'-phosphate
  modified_base 16: mod_base = OTHER; note = adenosine-3'-phosphate
  modified_base 17: mod_base = OTHER; note = guanosine-3'-phosphate
  modified_base 18: mod_base = OTHER; note = adenosine-3'-phosphate
  modified_base 19: mod_base = OTHER; note = adenosine-3'-phosphate
  misc_feature 1..19: note = RNA
  misc_feature 20..21: note = DNA
ggctaagcgatctcgagaatt

SEQ ID NO: 574 - DNA, 21 bp, synthetic construct
  source 1..21: mol_type = other DNA
  modified_base 1: mod_base = OTHER; note = uridine-3'-phosphate
  modified_base 2: mod_base = OTHER; note = guanosine-3'-phosphate
  modified_base 3: mod_base = OTHER; note = adenosine-3'-phosphate
  modified_base 4: mod_base = OTHER; note = uridine-3'-phosphate
  modified_base 5: mod_base = OTHER; note = guanosine-3'-phosphate
  modified_base 6: mod_base = OTHER; note = cytidine-3'-phosphate
  modified_base 7: mod_base = OTHER; note = adenosine-3'-phosphate
  modified_base 8: mod_base = OTHER; note = adenosine-3'-phosphate
  modified_base 9: mod_base = OTHER; note = adenosine-3'-phosphate
  modified_base 10: mod_base = OTHER; note = cytidine-3'-phosphate
  modified_base 11: mod_base = OTHER; note = cytidine-3'-phosphate
  modified_base 12: mod_base = OTHER; note = uridine-3'-phosphate
  modified_base 13: mod_base = OTHER; note = uridine-3'-phosphate
  modified_base 14: mod_base = OTHER; note = uridine-3'-phosphate
  modified_base 15: mod_base = OTHER; note = uridine-3'-phosphate
  modified_base 16: mod_base = OTHER; note = uridine-3'-phosphate
  modified_base 17: mod_base = OTHER; note = adenosine-3'-phosphate
  modified_base 18: mod_base = OTHER; note = adenosine-3'-phosphate
  modified_base 19: mod_base = OTHER; note = adenosine-3'-phosphate
  misc_feature 1..19: note = RNA
  misc_feature 20..21: note = DNA
tgatgcaaacctttttaaatt

SEQ ID NO: 575 - DNA, 21 bp, synthetic construct
  source 1..21: mol_type = other DNA
  modified_base 1: mod_base = OTHER; note = guanosine-3'-phosphate
  modified_base 2: mod_base = OTHER; note = guanosine-3'-phosphate
  modified_base 3: mod_base = OTHER; note = adenosine-3'-phosphate
  modified_base 4: mod_base = OTHER; note = cytidine-3'-phosphate
  modified_base 5: mod_base = OTHER; note = uridine-3'-phosphate
  modified_base 6: mod_base = OTHER; note = cytidine-3'-phosphate
  modified_base 7: mod_base = OTHER; note = adenosine-3'-phosphate
  modified_base 8: mod_base = OTHER; note = cytidine-3'-phosphate
  modified_base 9: mod_base = OTHER; note = adenosine-3'-phosphate
  modified_base 10: mod_base = OTHER; note = guanosine-3'-phosphate
  modified_base 11: mod_base = OTHER; note = cytidine-3'-phosphate
  modified_base 12: mod_base = OTHER; note = uridine-3'-phosphate
  modified_base 13: mod_base = OTHER; note = guanosine-3'-phosphate
  modified_base 14: mod_base = OTHER; note = adenosine-3'-phosphate
  modified_base 15: mod_base = OTHER; note = uridine-3'-phosphate
  modified_base 16: mod_base = OTHER; note = guanosine-3'-phosphate
  modified_base 17: mod_base = OTHER; note = cytidine-3'-phosphate
  modified_base 18: mod_base = OTHER; note = adenosine-3'-phosphate
  modified_base 19: mod_base = OTHER; note = adenosine-3'-phosphate
  misc_feature 1..19: note = RNA
  misc_feature 20..21: note = DNA
ggactcacagctgatgcaatt

SEQ ID NO: 576 - DNA, 21 bp, synthetic construct
  source 1..21: mol_type = other DNA
  modified_base 1: mod_base = OTHER; note = cytidine-3'-phosphate
  modified_base 2: mod_base = OTHER; note = uridine-3'-phosphate
  modified_base 3: mod_base = OTHER; note = uridine-3'-phosphate
  modified_base 4: mod_base = OTHER; note = guanosine-3'-phosphate
  modified_base 5: mod_base = OTHER; note = uridine-3'-phosphate
  modified_base 6: mod_base = OTHER; note = cytidine-3'-phosphate
  modified_base 7: mod_base = OTHER; note = adenosine-3'-phosphate
  modified_base 8: mod_base = OTHER; note = guanosine-3'-phosphate
  modified_base 9: mod_base = OTHER; note = adenosine-3'-phosphate
  modified_base 10: mod_base = OTHER; note = uridine-3'-phosphate
  modified_base 11: mod_base = OTHER; note = guanosine-3'-phosphate
  modified_base 12: mod_base = OTHER; note = guanosine-3'-phosphate
  modified_base 13: mod_base = OTHER; note = adenosine-3'-phosphate
  modified_base 14: mod_base = OTHER; note = cytidine-3'-phosphate
  modified_base 15: mod_base = OTHER; note = uridine-3'-phosphate
  modified_base 16: mod_base = OTHER; note = cytidine-3'-phosphate
  modified_base 17: mod_base = OTHER; note = adenosine-3'-phosphate
  modified_base 18: mod_base = OTHER; note = cytidine-3'-phosphate
  modified_base 19: mod_base = OTHER; note = adenosine-3'-phosphate
  misc_feature 1..19: note = RNA
  misc_feature 20..21: note = DNA
cttgtcagatggactcacatt

SEQ ID NO: 577 - DNA, 21 bp, synthetic construct
  source 1..21: mol_type = other DNA
  modified_base 1: mod_base = OTHER; note = adenosine-3'-phosphate
  modified_base 2: mod_base = OTHER; note = guanosine-3'-phosphate
  modified_base 3: mod_base = OTHER; note = uridine-3'-phosphate
  modified_base 4: mod_base = OTHER; note = uridine-3'-phosphate
  modified_base 5: mod_base = OTHER; note = uridine-3'-phosphate
  modified_base 6: mod_base = OTHER; note = cytidine-3'-phosphate
  modified_base 7: mod_base = OTHER; note = cytidine-3'-phosphate
  modified_base 8: mod_base = OTHER; note = uridine-3'-phosphate
  modified_base 9: mod_base = OTHER; note = cytidine-3'-phosphate
  modified_base 10: mod_base = OTHER; note = guanosine-3'-phosphate
  modified_base 11: mod_base = OTHER; note = cytidine-3'-phosphate
  modified_base 12: mod_base = OTHER; note = uridine-3'-phosphate
  modified_base 13: mod_base = OTHER; note = uridine-3'-phosphate
  modified_base 14: mod_base = OTHER; note = guanosine-3'-phosphate
  modified_base 15: mod_base = OTHER; note = uridine-3'-phosphate
  modified_base 16: mod_base = OTHER; note = cytidine-3'-phosphate
  modified_base 17: mod_base = OTHER; note = adenosine-3'-phosphate
  modified_base 18: mod_base = OTHER; note = guanosine-3'-phosphate
  modified_base 19: mod_base = OTHER; note = adenosine-3'-phosphate
  misc_feature 1..19: note = RNA
  misc_feature 20..21: note = DNA
agtttcctcgcttgtcagatt

SEQ ID NO: 578 - DNA, 21 bp, synthetic construct
  source 1..21: mol_type = other DNA
  modified_base 1: mod_base = OTHER; note = adenosine-3'-phosphate
  modified_base 2: mod_base = OTHER; note = cytidine-3'-phosphate
  modified_base 3: mod_base = OTHER; note = uridine-3'-phosphate
  modified_base 4: mod_base = OTHER; note = uridine-3'-phosphate
  modified_base 5: mod_base = OTHER; note = cytidine-3'-phosphate
  modified_base 6: mod_base = OTHER; note = uridine-3'-phosphate
  modified_base 7: mod_base = OTHER; note = cytidine-3'-phosphate
  modified_base 8: mod_base = OTHER; note = adenosine-3'-phosphate
  modified_base 9: mod_base = OTHER; note = guanosine-3'-phosphate
  modified_base 10: mod_base = OTHER; note = cytidine-3'-phosphate
  modified_base 11: mod_base = OTHER; note = cytidine-3'-phosphate
  modified_base 12: mod_base = OTHER; note = uridine-3'-phosphate
  modified_base 13: mod_base = OTHER; note = uridine-3'-phosphate
  modified_base 14: mod_base = OTHER; note = adenosine-3'-phosphate
  modified_base 15: mod_base = OTHER; note = guanosine-3'-phosphate
  modified_base 16: mod_base = OTHER; note = uridine-3'-phosphate
  modified_base 17: mod_base = OTHER; note = uridine-3'-phosphate
  modified_base 18: mod_base = OTHER; note = uridine-3'-phosphate
  modified_base 19: mod_base = OTHER; note = cytidine-3'-phosphate
  misc_feature 1..19: note = RNA
  misc_feature 20..21: note = DNA
acttctcagccttagtttctt

SEQ ID NO: 579 - DNA, 21 bp, synthetic construct
  source 1..21: mol_type = other DNA
  modified_base 1: mod_base = OTHER; note = adenosine-3'-phosphate
  modified_base 2: mod_base = OTHER; note = adenosine-3'-phosphate
  modified_base 3: mod_base = OTHER; note = cytidine-3'-phosphate
  modified_base 4: mod_base = OTHER; note = guanosine-3'-phosphate
  modified_base 5: mod_base = OTHER; note = cytidine-3'-phosphate
  modified_base 6: mod_base = OTHER; note = cytidine-3'-phosphate
  modified_base 7: mod_base = OTHER; note = uridine-3'-phosphate
  modified_base 8: mod_base = OTHER; note = cytidine-3'-phosphate
  modified_base 9: mod_base = OTHER; note = cytidine-3'-phosphate
  modified_base 10: mod_base = OTHER; note = cytidine-3'-phosphate
  modified_base 11: mod_base = OTHER; note = adenosine-3'-phosphate
  modified_base 12: mod_base = OTHER; note = cytidine-3'-phosphate
  modified_base 13: mod_base = OTHER; note = uridine-3'-phosphate
  modified_base 14: mod_base = OTHER; note = uridine-3'-phosphate
  modified_base 15: mod_base = OTHER; note = cytidine-3'-phosphate
  modified_base 16: mod_base = OTHER; note = uridine-3'-phosphate
  modified_base 17: mod_base = OTHER; note = cytidine-3'-phosphate
  modified_base 18: mod_base = OTHER; note = adenosine-3'-phosphate
  modified_base 19: mod_base = OTHER; note = guanosine-3'-phosphate
  misc_feature 1..19: note = RNA
  misc_feature 20..21: note = DNA
aacgcctcccacttctcagtt

SEQ ID NO: 580 - DNA, 21 bp, synthetic construct
  source 1..21: mol_type = other DNA
  modified_base 1: mod_base = OTHER; note = cytidine-3'-phosphate
  modified_base 2: mod_base = OTHER; note = cytidine-3'-phosphate
  modified_base 3: mod_base = OTHER; note = uridine-3'-phosphate
  modified_base 4: mod_base = OTHER; note = guanosine-3'-phosphate
  modified_base 5: mod_base = OTHER; note = cytidine-3'-phosphate
  modified_base 6: mod_base = OTHER; note = adenosine-3'-phosphate
  modified_base 7: mod_base = OTHER; note = guanosine-3'-phosphate
  modified_base 8: mod_base = OTHER; note = adenosine-3'-phosphate
  modified_base 9: mod_base = OTHER; note = uridine-3'-phosphate
  modified_base 10: mod_base = OTHER; note = guanosine-3'-phosphate
  modified_base 11: mod_base = OTHER; note = guanosine-3'-phosphate
  modified_base 12: mod_base = OTHER; note = cytidine-3'-phosphate
  modified_base 13: mod_base = OTHER; note = adenosine-3'-phosphate
  modified_base 14: mod_base = OTHER; note = adenosine-3'-phosphate
  modified_base 15: mod_base = OTHER; note = cytidine-3'-phosphate
  modified_base 16: mod_base = OTHER; note = guanosine-3'-phosphate
  modified_base 17: mod_base = OTHER; note = cytidine-3'-phosphate
  modified_base 18: mod_base = OTHER; note = cytidine-3'-phosphate
  modified_base 19: mod_base = OTHER; note = uridine-3'-phosphate
  misc_feature 1..19: note = RNA
  misc_feature 20..21: note = DNA
cctgcagatggcaacgccttt

SEQ ID NO: 581 - DNA, 21 bp, synthetic construct
  source 1..21: mol_type = other DNA
  modified_base 1: mod_base = OTHER; note = guanosine-3'-phosphate
  modified_base 2: mod_base = OTHER; note = guanosine-3'-phosphate
  modified_base 3: mod_base = OTHER; note = uridine-3'-phosphate
  modified_base 4: mod_base = OTHER; note = uridine-3'-phosphate
  modified_base 5: mod_base = OTHER; note = guanosine-3'-phosphate
  modified_base 6: mod_base = OTHER; note = cytidine-3'-phosphate
  modified_base 7: mod_base = OTHER; note = cytidine-3'-phosphate
  modified_base 8: mod_base = OTHER; note = uridine-3'-phosphate
  modified_base 9: mod_base = OTHER; note = guanosine-3'-phosphate
  modified_base 10: mod_base = OTHER; note = guanosine-3'-phosphate
  modified_base 11: mod_base = OTHER; note = guanosine-3'-phosphate
  modified_base 12: mod_base = OTHER; note = cytidine-3'-phosphate
  modified_base 13: mod_base = OTHER; note = cytidine-3'-phosphate
  modified_base 14: mod_base = OTHER; note = uridine-3'-phosphate
  modified_base 15: mod_base = OTHER; note = guanosine-3'-phosphate
  modified_base 16: mod_base = OTHER; note = cytidine-3'-phosphate
  modified_base 17: mod_base = OTHER; note = adenosine-3'-phosphate
  modified_base 18: mod_base = OTHER; note = guanosine-3'-phosphate
  modified_base 19: mod_base = OTHER; note = adenosine-3'-phosphate
  misc_feature 1..19: note = RNA
  misc_feature 20..21: note = DNA
ggttgcctgggcctgcagatt

SEQ ID NO: 582 - DNA, 21 bp, synthetic construct
  source 1..21: mol_type = other DNA
  modified_base 1: mod_base = OTHER; note = uridine-3'-phosphate
  modified_base 2: mod_base = OTHER; note = uridine-3'-phosphate
  modified_base 3: mod_base = OTHER; note = cytidine-3'-phosphate
  modified_base 4: mod_base = OTHER; note = cytidine-3'-phosphate
  modified_base 5: mod_base = OTHER; note = cytidine-3'-phosphate
  modified_base 6: mod_base = OTHER; note = guanosine-3'-phosphate
  modified_base 7: mod_base = OTHER; note = uridine-3'-phosphate
  modified_base 8: mod_base = OTHER; note = adenosine-3'-phosphate
  modified_base 9: mod_base = OTHER; note = guanosine-3'-phosphate
  modified_base 10: mod_base = OTHER; note = cytidine-3'-phosphate
  modified_base 11: mod_base = OTHER; note = adenosine-3'-phosphate
  modified_base 12: mod_base = OTHER; note = guanosine-3'-phosphate
  modified_base 13: mod_base = OTHER; note = guanosine-3'-phosphate
  modified_base 14: mod_base = OTHER; note = uridine-3'-phosphate
  modified_base 15: mod_base = OTHER; note = uridine-3'-phosphate
  modified_base 16: mod_base = OTHER; note = guanosine-3'-phosphate
  modified_base 17: mod_base = OTHER; note = cytidine-3'-phosphate
  modified_base 18: mod_base = OTHER; note = cytidine-3'-phosphate
  modified_base 19: mod_base = OTHER; note = uridine-3'-phosphate
  misc_feature 1..19: note = RNA
  misc_feature 20..21: note = DNA
ttcccgtagcaggttgccttt

SEQ ID NO: 583 - DNA, 21 bp, synthetic construct
  source 1..21: mol_type = other DNA
  modified_base 1: mod_base = OTHER; note = guanosine-3'-phosphate
  modified_base 2: mod_base = OTHER; note = guanosine-3'-phosphate
  modified_base 3: mod_base = OTHER; note = uridine-3'-phosphate
  modified_base 4: mod_base = OTHER; note = cytidine-3'-phosphate
  modified_base 5: mod_base = OTHER; note = cytidine-3'-phosphate
  modified_base 6: mod_base = OTHER; note = cytidine-3'-phosphate
  modified_base 7: mod_base = OTHER; note = cytidine-3'-phosphate
  modified_base 8: mod_base = OTHER; note = guanosine-3'-phosphate
  modified_base 9: mod_base = OTHER; note = guanosine-3'-phosphate
  modified_base 10: mod_base = OTHER; note = uridine-3'-phosphate
  modified_base 11: mod_base = OTHER; note = cytidine-3'-phosphate
  modified_base 12: mod_base = OTHER; note = uridine-3'-phosphate
  modified_base 13: mod_base = OTHER; note = uridine-3'-phosphate
  modified_base 14: mod_base = OTHER; note = cytidine-3'-phosphate
  modified_base 15: mod_base = OTHER; note = cytidine-3'-phosphate
  modified_base 16: mod_base = OTHER; note = cytidine-3'-phosphate
  modified_base 17: mod_base = OTHER; note = guanosine-3'-phosphate
  modified_base 18: mod_base = OTHER; note = uridine-3'-phosphate
  modified_base 19: mod_base = OTHER; note = adenosine-3'-phosphate
  misc_feature 1..19: note = RNA
  misc_feature 20..21: note = DNA
ggtccccggtcttcccgtatt

SEQ ID NO: 584 - DNA, 21 bp, synthetic construct
  source 1..21: mol_type = other DNA
  modified_base 1: mod_base = OTHER; note = cytidine-3'-phosphate
  modified_base 2: mod_base = OTHER; note = cytidine-3'-phosphate
  modified_base 3: mod_base = OTHER; note = adenosine-3'-phosphate
  modified_base 4: mod_base = OTHER; note = guanosine-3'-phosphate
  modified_base 5: mod_base = OTHER; note = adenosine-3'-phosphate
  modified_base 6: mod_base = OTHER; note = guanosine-3'-phosphate
  modified_base 7: mod_base = OTHER; note = guanosine-3'-phosphate
  modified_base 8: mod_base = OTHER; note = uridine-3'-phosphate
  modified_base 9: mod_base = OTHER; note = cytidine-3'-phosphate
  modified_base 10: mod_base = OTHER; note = uridine-3'-phosphate
  modified_base 11: mod_base = OTHER; note = uridine-3'-phosphate
  modified_base 12: mod_base = OTHER; note = guanosine-3'-phosphate
  modified_base 13: mod_base = OTHER; note = guanosine-3'-phosphate
  modified_base 14: mod_base = OTHER; note = uridine-3'-phosphate
  modified_base 15: mod_base = OTHER; note = cytidine-3'-phosphate
  modified_base 16: mod_base = OTHER; note = cytidine-3'-phosphate
  modified_base 17: mod_base = OTHER; note = cytidine-3'-phosphate
  modified_base 18: mod_base = OTHER; note = cytidine-3'-phosphate
  modified_base 19: mod_base = OTHER; note = guanosine-3'-phosphate
  misc_feature 1..19: note = RNA
  misc_feature 20..21: note = DNA
ccagaggtcttggtccccgtt

SEQ ID NO: 585 - DNA, 21 bp, synthetic construct
  source 1..21: mol_type = other DNA
  modified_base 1: mod_base = OTHER; note = adenosine-3'-phosphate
  modified_base 2: mod_base = OTHER; note = adenosine-3'-phosphate
  modified_base 3: mod_base = OTHER; note = adenosine-3'-phosphate
  modified_base 4: mod_base = OTHER; note = guanosine-3'-phosphate
  modified_base 5: mod_base = OTHER; note = cytidine-3'-phosphate
  modified_base 6: mod_base = OTHER; note = cytidine-3'-phosphate
  modified_base 7: mod_base = OTHER; note = adenosine-3'-phosphate
  modified_base 8: mod_base = OTHER; note = adenosine-3'-phosphate
  modified_base 9: mod_base = OTHER; note = cytidine-3'-phosphate
  modified_base 10: mod_base = OTHER; note = cytidine-3'-phosphate
  modified_base 11: mod_base = OTHER; note = cytidine-3'-phosphate
  modified_base 12: mod_base = OTHER; note = adenosine-3'-phosphate
  modified_base 13: mod_base = OTHER; note = guanosine-3'-phosphate
  modified_base 14: mod_base = OTHER; note = adenosine-3'-phosphate
  modified_base 15: mod_base = OTHER; note = guanosine-3'-phosphate
  modified_base 16: mod_base = OTHER; note = guanosine-3'-phosphate
  modified_base 17: mod_base = OTHER; note = uridine-3'-phosphate
  modified_base 18: mod_base = OTHER; note = cytidine-3'-phosphate
  modified_base 19: mod_base = OTHER; note = uridine-3'-phosphate
  misc_feature 1..19: note = RNA
  misc_feature 20..21: note = DNA
aaagccaacccagaggtcttt

SEQ ID NO: 586 - DNA, 21 bp, synthetic construct
  source 1..21: mol_type = other DNA
  modified_base 1: mod_base = OTHER; note = guanosine-3'-phosphate
  modified_base 2: mod_base = OTHER; note = cytidine-3'-phosphate
  modified_base 3: mod_base = OTHER; note = guanosine-3'-phosphate
  modified_base 4: mod_base = OTHER; note = guanosine-3'-phosphate
  modified_base 5: mod_base = OTHER; note = guanosine-3'-phosphate
  modified_base 6: mod_base = OTHER; note = uridine-3'-phosphate
  modified_base 7: mod_base = OTHER; note = cytidine-3'-phosphate
  modified_base 8: mod_base = OTHER; note = uridine-3'-phosphate
  modified_base 9: mod_base = OTHER; note = adenosine-3'-phosphate
  modified_base 10: mod_base = OTHER; note = guanosine-3'-phosphate
  modified_base 11: mod_base = OTHER; note = guanosine-3'-phosphate
  modified_base 12: mod_base = OTHER; note = adenosine-3'-phosphate
  modified_base 13: mod_base = OTHER; note = adenosine-3'-phosphate
  modified_base 14: mod_base = OTHER; note = adenosine-3'-phosphate
  modified_base 15: mod_base = OTHER; note = guanosine-3'-phosphate
  modified_base 16: mod_base = OTHER; note = cytidine-3'-phosphate
  modified_base 17: mod_base = OTHER; note = cytidine-3'-phosphate
  modified_base 18: mod_base = OTHER; note = adenosine-3'-phosphate
  modified_base 19: mod_base = OTHER; note = adenosine-3'-phosphate
  misc_feature 1..19: note = RNA
  misc_feature 20..21: note = DNA
gcgggtctaggaaagccaatt

SEQ ID NO: 587 - DNA, 21 bp, synthetic construct
  source 1..21: mol_type = other DNA
  modified_base 1: mod_base = OTHER; note = cytidine-3'-phosphate
  modified_base 2: mod_base = OTHER; note = guanosine-3'-phosphate
  modified_base 3: mod_base = OTHER; note = adenosine-3'-phosphate
  modified_base 4: mod_base = OTHER; note = adenosine-3'-phosphate
  modified_base 5: mod_base = OTHER; note = guanosine-3'-phosphate
  modified_base 6: mod_base = OTHER; note = adenosine-3'-phosphate
  modified_base 7: mod_base = OTHER; note = cytidine-3'-phosphate
  modified_base 8: mod_base = OTHER; note = cytidine-3'-phosphate
  modified_base 9: mod_base = OTHER; note = cytidine-3'-phosphate
  modified_base 10: mod_base = OTHER; note = guanosine-3'-phosphate
  modified_base 11: mod_base = OTHER; note = adenosine-3'-phosphate
  modified_base 12: mod_base = OTHER; note = guanosine-3'-phosphate
  modified_base 13: mod_base = OTHER; note = cytidine-3'-phosphate
  modified_base 14: mod_base = OTHER; note = guanosine-3'-phosphate
  modified_base 15: mod_base = OTHER; note = guanosine-3'-phosphate
  modified_base 16: mod_base = OTHER; note = guanosine-3'-phosphate
  modified_base 17: mod_base = OTHER; note = uridine-3'-phosphate
  modified_base 18: mod_base = OTHER; note = cytidine-3'-phosphate
  modified_base 19: mod_base = OTHER; note = uridine-3'-phosphate
  misc_feature 1..19: note = RNA
  misc_feature 20..21: note = DNA
cgaagacccgagcgggtcttt

SEQ ID NO: 588 - DNA, 21 bp, synthetic construct
  source 1..21: mol_type = other DNA
  modified_base 1: mod_base = OTHER; note = uridine-3'-phosphate
  modified_base 2: mod_base = OTHER; note = cytidine-3'-phosphate
  modified_base 3: mod_base = OTHER; note = cytidine-3'-phosphate
  modified_base 4: mod_base = OTHER; note = uridine-3'-phosphate
  modified_base 5: mod_base = OTHER; note = cytidine-3'-phosphate
  modified_base 6: mod_base = OTHER; note = guanosine-3'-phosphate
  modified_base 7: mod_base = OTHER; note = cytidine-3'-phosphate
  modified_base 8: mod_base = OTHER; note = guanosine-3'-phosphate
  modified_base 9: mod_base = OTHER; note = adenosine-3'-phosphate
  modified_base 10: mod_base = OTHER; note = cytidine-3'-phosphate
  modified_base 11: mod_base = OTHER; note = adenosine-3'-phosphate
  modified_base 12: mod_base = OTHER; note = cytidine-3'-phosphate
  modified_base 13: mod_base = OTHER; note = cytidine-3'-phosphate
  modified_base 14: mod_base = OTHER; note = cytidine-3'-phosphate
  modified_base 15: mod_base = OTHER; note = guanosine-3'-phosphate
  modified_base 16: mod_base = OTHER; note = adenosine-3'-phosphate
  modified_base 17: mod_base = OTHER; note = adenosine-3'-phosphate
  modified_base 18: mod_base = OTHER; note = guanosine-3'-phosphate
  modified_base 19: mod_base = OTHER; note = adenosine-3'-phosphate
  misc_feature 1..19: note = RNA
  misc_feature 20..21: note = DNA
tcctcgcgacacccgaagatt

SEQ ID NO: 589 - DNA, 21 bp, synthetic construct
  source 1..21: mol_type = other DNA
  modified_base 1: mod_base = OTHER; note = adenosine-3'-phosphate
  modified_base 2: mod_base = OTHER; note = guanosine-3'-phosphate
  modified_base 3: mod_base = OTHER; note = cytidine-3'-phosphate
  modified_base 4: mod_base = OTHER; note = adenosine-3'-phosphate
  modified_base 5: mod_base = OTHER; note = guanosine-3'-phosphate
  modified_base 6: mod_base = OTHER; note = guanosine-3'-phosphate
  modified_base 7: mod_base = OTHER; note = guanosine-3'-phosphate
  modified_base 8: mod_base = OTHER; note = cytidine-3'-phosphate
  modified_base 9: mod_base = OTHER; note = cytidine-3'-phosphate
  modified_base 10: mod_base = OTHER; note = cytidine-3'-phosphate
  modified_base 11: mod_base = OTHER; note = uridine-3'-phosphate
  modified_base 12: mod_base = OTHER; note = uridine-3'-phosphate
  modified_base 13: mod_base = OTHER; note = cytidine-3'-phosphate
  modified_base 14: mod_base = OTHER; note = cytidine-3'-phosphate
  modified_base 15: mod_base = OTHER; note = uridine-3'-phosphate
  modified_base 16: mod_base = OTHER; note = cytidine-3'-phosphate
  modified_base 17: mod_base = OTHER; note = guanosine-3'-phosphate
  modified_base 18: mod_base = OTHER; note = cytidine-3'-phosphate
  modified_base 19: mod_base = OTHER; note = guanosine-3'-phosphate
  misc_feature 1..19: note = RNA
  misc_feature 20..21: note = DNA
agcagggcccttcctcgcgtt

SEQ ID NO: 590 - DNA, 21 bp, synthetic construct
  source 1..21: mol_type = other DNA
  modified_base 1: mod_base = OTHER; note = adenosine-3'-phosphate
  modified_base 2: mod_base = OTHER; note = adenosine-3'-phosphate
  modified_base 3: mod_base = OTHER; note = cytidine-3'-phosphate
  modified_base 4: mod_base = OTHER; note = guanosine-3'-phosphate
  modified_base 5: mod_base = OTHER; note = adenosine-3'-phosphate
  modified_base 6: mod_base = OTHER; note = adenosine-3'-phosphate
  modified_base 7: mod_base = OTHER; note = adenosine-3'-phosphate
  modified_base 8: mod_base = OTHER; note = guanosine-3'-phosphate
  modified_base 9: mod_base = OTHER; note = guanosine-3'-phosphate
  modified_base 10: mod_base = OTHER; note = adenosine-3'-phosphate
  modified_base 11: mod_base = OTHER; note = guanosine-3'-phosphate
  modified_base 12: mod_base = OTHER; note = cytidine-3'-phosphate
  modified_base 13: mod_base = OTHER; note = adenosine-3'-phosphate
  modified_base 14: mod_base = OTHER; note = guanosine-3'-phosphate
  modified_base 15: mod_base = OTHER; note = guanosine-3'-phosphate
  modified_base 16: mod_base = OTHER; note = guanosine-3'-phosphate
  modified_base 17: mod_base = OTHER; note = cytidine-3'-phosphate
  modified_base 18: mod_base = OTHER; note = cytidine-3'-phosphate
  modified_base 19: mod_base = OTHER; note = cytidine-3'-phosphate
  misc_feature 1..19: note = RNA
  misc_feature 20..21: note = DNA
aacgaaaggagcagggccctt

SEQ ID NO: 591 - DNA, 21 bp, synthetic construct
  source 1..21: mol_type = other DNA
  modified_base 1: mod_base = OTHER; note = uridine-3'-phosphate
  modified_base 2: mod_base = OTHER; note = guanosine-3'-phosphate
  modified_base 3: mod_base = OTHER; note = cytidine-3'-phosphate
  modified_base 4: mod_base = OTHER; note = adenosine-3'-phosphate
  modified_base 5: mod_base = OTHER; note = guanosine-3'-phosphate
  modified_base 6: mod_base = OTHER; note = cytidine-3'-phosphate
  modified_base 7: mod_base = OTHER; note = guanosine-3'-phosphate
  modified_base 8: mod_base = OTHER; note = guanosine-3'-phosphate
  modified_base 9: mod_base = OTHER; note = cytidine-3'-phosphate
  modified_base 10: mod_base = OTHER; note = cytidine-3'-phosphate
  modified_base 11: mod_base = OTHER; note = adenosine-3'-phosphate
  modified_base 12: mod_base = OTHER; note = guanosine-3'-phosphate
  modified_base 13: mod_base = OTHER; note = guanosine-3'-phosphate
  modified_base 14: mod_base = OTHER; note = guanosine-3'-phosphate
  modified_base 15: mod_base = OTHER; note = guanosine-3'-phosphate
  modified_base 16: mod_base = OTHER; note = uridine-3'-phosphate
  modified_base 17: mod_base = OTHER; note = guanosine-3'-phosphate
  modified_base 18: mod_base = OTHER; note = cytidine-3'-phosphate
  modified_base 19: mod_base = OTHER; note = adenosine-3'-phosphate
  misc_feature 1..19: note = RNA
  misc_feature 20..21: note = DNA
tgcagcggccaggggtgcatt

SEQ ID NO: 592 - DNA, 21 bp, synthetic construct
  source 1..21: mol_type = other DNA
  modified_base 1: mod_base = OTHER; note = adenosine-3'-phosphate
  modified_base 2: mod_base = OTHER; note = guanosine-3'-phosphate
  modified_base 3: mod_base = OTHER; note = guanosine-3'-phosphate
  modified_base 4: mod_base = OTHER; note = guanosine-3'-phosphate
  modified_base 5: mod_base = OTHER; note = adenosine-3'-phosphate
  modified_base 6: mod_base = OTHER; note = guanosine-3'-phosphate
  modified_base 7: mod_base = OTHER; note = cytidine-3'-phosphate
  modified_base 8: mod_base = OTHER; note = cytidine-3'-phosphate
  modified_base 9: mod_base = OTHER; note = adenosine-3'-phosphate
  modified_base 10: mod_base = OTHER; note = cytidine-3'-phosphate
  modified_base 11: mod_base = OTHER; note = cytidine-3'-phosphate
  modified_base 12: mod_base = OTHER; note = uridine-3'-phosphate
  modified_base 13: mod_base = OTHER; note = guanosine-3'-phosphate
  modified_base 14: mod_base = OTHER; note = cytidine-3'-phosphate
  modified_base 15: mod_base = OTHER; note = adenosine-3'-phosphate
  modified_base 16: mod_base = OTHER; note = guanosine-3'-phosphate
  modified_base 17: mod_base = OTHER; note = cytidine-3'-phosphate
  modified_base 18: mod_base = OTHER; note = guanosine-3'-phosphate
  modified_base 19: mod_base = OTHER; note = guanosine-3'-phosphate
  misc_feature 1..19: note = RNA
  misc_feature 20..21: note = DNA
agggagccacctgcagcggtt

SEQ ID NO: 593 - DNA, 21 bp, synthetic construct
  source 1..21: mol_type = other DNA
  modified_base 1: mod_base = OTHER; note = adenosine-3'-phosphate
  modified_base 2: mod_base = OTHER; note = guanosine-3'-phosphate
  modified_base 3: mod_base = OTHER; note = cytidine-3'-phosphate
  modified_base 4: mod_base = OTHER; note = uridine-3'-phosphate
  modified_base 5: mod_base = OTHER; note = cytidine-3'-phosphate
  modified_base 6: mod_base = OTHER; note = cytidine-3'-phosphate
  modified_base 7: mod_base = OTHER; note = uridine-3'-phosphate
  modified_base 8: mod_base = OTHER; note = cytidine-3'-phosphate
  modified_base 9: mod_base = OTHER; note = cytidine-3'-phosphate
  modified_base 10: mod_base = OTHER; note = uridine-3'-phosphate
  modified_base 11: mod_base = OTHER; note = cytidine-3'-phosphate
  modified_base 12: mod_base = OTHER; note = cytidine-3'-phosphate
  modified_base 13: mod_base = OTHER; note = adenosine-3'-phosphate
  modified_base 14: mod_base = OTHER; note = guanosine-3'-phosphate
  modified_base 15: mod_base = OTHER; note = guanosine-3'-phosphate
  modified_base 16: mod_base = OTHER; note = guanosine-3'-phosphate
  modified_base 17: mod_base = OTHER; note = adenosine-3'-phosphate
  modified_base 18: mod_base = OTHER; note = guanosine-3'-phosphate
  modified_base 19: mod_base = OTHER; note = cytidine-3'-phosphate
  misc_feature 1..19: note = RNA
  misc_feature 20..21: note = DNA
agctcctcctccagggagctt

SEQ ID NO: 594 - DNA, 21 bp, synthetic construct
  source 1..21: mol_type = other DNA
  modified_base 1: mod_base = OTHER; note = cytidine-3'-phosphate
  modified_base 2: mod_base = OTHER; note = cytidine-3'-phosphate
  modified_base 3: mod_base = OTHER; note = uridine-3'-phosphate
  modified_base 4: mod_base = OTHER; note = cytidine-3'-phosphate
  modified_base 5: mod_base = OTHER; note = cytidine-3'-phosphate
  modified_base 6: mod_base = OTHER; note = guanosine-3'-phosphate
  modified_base 7: mod_base = OTHER; note = cytidine-3'-phosphate
  modified_base 8: mod_base = OTHER; note = guanosine-3'-phosphate
  modified_base 9: mod_base = OTHER; note = uridine-3'-phosphate
  modified_base 10: mod_base = OTHER; note = guanosine-3'-phosphate
  modified_base 11: mod_base = OTHER; note = guanosine-3'-phosphate
  modified_base 12: mod_base = OTHER; note = guanosine-3'-phosphate
  modified_base 13: mod_base = OTHER; note = adenosine-3'-phosphate
  modified_base 14: mod_base = OTHER; note = guanosine-3'-phosphate
  modified_base 15: mod_base = OTHER; note = cytidine-3'-phosphate
  modified_base 16: mod_base = OTHER; note = uridine-3'-phosphate
  modified_base 17: mod_base = OTHER; note = cytidine-3'-phosphate
  modified_base 18: mod_base = OTHER; note = cytidine-3'-phosphate
  modified_base 19: mod_base = OTHER; note = uridine-3'-phosphate
  misc_feature 1..19: note = RNA
  misc_feature 20..21: note = DNA
cctccgcgtgggagctccttt

SEQ ID NO: 595 - DNA, 21 bp, synthetic construct
  source 1..21: mol_type = other DNA
  modified_base 1: mod_base = OTHER; note = cytidine-3'-phosphate
  modified_base 2: mod_base = OTHER; note = cytidine-3'-phosphate
  modified_base 3: mod_base = OTHER; note = uridine-3'-phosphate
  modified_base 4: mod_base = OTHER; note = guanosine-3'-phosphate
  modified_base 5: mod_base = OTHER; note = guanosine-3'-phosphate
  modified_base 6: mod_base = OTHER; note = cytidine-3'-phosphate
  modified_base 7: mod_base = OTHER; note = uridine-3'-phosphate
  modified_base 8: mod_base = OTHER; note = cytidine-3'-phosphate
  modified_base 9: mod_base = OTHER; note = cytidine-3'-phosphate
  modified_base 10: mod_base = OTHER; note = uridine-3'-phosphate
  modified_base 11: mod_base = OTHER; note = cytidine-3'-phosphate
  modified_base 12: mod_base = OTHER; note = cytidine-3'-phosphate
  modified_base 13: mod_base = OTHER; note = uridine-3'-phosphate
  modified_base 14: mod_base = OTHER; note = cytidine-3'-phosphate
  modified_base 15: mod_base = OTHER; note = cytidine-3'-phosphate
  modified_base 16: mod_base = OTHER; note = guanosine-3'-phosphate
  modified_base 17: mod_base = OTHER; note = cytidine-3'-phosphate
  modified_base 18: mod_base = OTHER; note = guanosine-3'-phosphate
  modified_base 19: mod_base = OTHER; note = uridine-3'-phosphate
  misc_feature 1..19: note = RNA
  misc_feature 20..21: note = DNA
cctggctcctcctccgcgttt

SEQ ID NO: 596 - DNA, 21 bp, synthetic construct
  source 1..21: mol_type = other DNA
  modified_base 1: mod_base = OTHER; note = guanosine-3'-phosphate
  modified_base 2: mod_base = OTHER; note = cytidine-3'-phosphate
  modified_base 3: mod_base = OTHER; note = uridine-3'-phosphate
  modified_base 4: mod_base = OTHER; note = cytidine-3'-phosphate
  modified_base 5: mod_base = OTHER; note = cytidine-3'-phosphate
  modified_base 6: mod_base = OTHER; note = cytidine-3'-phosphate
  modified_base 7: mod_base = OTHER; note = adenosine-3'-phosphate
  modified_base 8: mod_base = OTHER; note = guanosine-3'-phosphate
  modified_base 9: mod_base = OTHER; note = cytidine-3'-phosphate
  modified_base 10: mod_base = OTHER; note = uridine-3'-phosphate
  modified_base 11: mod_base = OTHER; note = guanosine-3'-phosphate
  modified_base 12: mod_base = OTHER; note = cytidine-3'-phosphate
  modified_base 13: mod_base = OTHER; note = cytidine-3'-phosphate
  modified_base 14: mod_base = OTHER; note = cytidine-3'-phosphate
  modified_base 15: mod_base = OTHER; note = uridine-3'-phosphate
  modified_base 16: mod_base = OTHER; note = guanosine-3'-phosphate
  modified_base 17: mod_base = OTHER; note = guanosine-3'-phosphate
  modified_base 18: mod_base = OTHER; note = cytidine-3'-phosphate
  modified_base 19: mod_base = OTHER; note = uridine-3'-phosphate
  misc_feature 1..19: note = RNA
  misc_feature 20..21: note = DNA
gctcccagctgccctggcttt

SEQ ID NO: 597 - DNA, 21 bp, synthetic construct
  source 1..21: mol_type = other DNA
  modified_base 1: mod_base = OTHER; note = adenosine-3'-phosphate
  modified_base 2: mod_base = OTHER; note = uridine-3'-phosphate
  modified_base 3: mod_base = OTHER; note = guanosine-3'-phosphate
  modified_base 4: mod_base = OTHER; note = guanosine-3'-phosphate
  modified_base 5: mod_base = OTHER; note = uridine-3'-phosphate
  modified_base 6: mod_base = OTHER; note = guanosine-3'-phosphate
  modified_base 7: mod_base = OTHER; note = uridine-3'-phosphate
  modified_base 8: mod_base = OTHER; note = cytidine-3'-phosphate
  modified_base 9: mod_base = OTHER; note = cytidine-3'-phosphate
  modified_base 10: mod_base = OTHER; note = cytidine-3'-phosphate
  modified_base 11: mod_base = OTHER; note = cytidine-3'-phosphate
  modified_base 12: mod_base = OTHER; note = guanosine-3'-phosphate
  modified_base 13: mod_base = OTHER; note = cytidine-3'-phosphate
  modified_base 14: mod_base = OTHER; note = uridine-3'-phosphate
  modified_base 15: mod_base = OTHER; note = cytidine-3'-phosphate
  modified_base 16: mod_base = OTHER; note = cytidine-3'-phosphate
  modified_base 17: mod_base = OTHER; note = cytidine-3'-phosphate
  modified_base 18: mod_base = OTHER; note = adenosine-3'-phosphate
  modified_base 19: mod_base = OTHER; note = guanosine-3'-phosphate
  misc_feature 1..19: note = RNA
  misc_feature 20..21: note = DNA
atggtgtccccgctcccagtt

SEQ ID NO: 598 - DNA, 21 bp, synthetic construct
  source 1..21: mol_type = other DNA
  modified_base 1: mod_base = OTHER; note = adenosine-3'-phosphate
  modified_base 2: mod_base = OTHER; note = uridine-3'-phosphate
  modified_base 3: mod_base = OTHER; note = cytidine-3'-phosphate
  modified_base 4: mod_base = OTHER; note = cytidine-3'-phosphate
  modified_base 5: mod_base = OTHER; note = adenosine-3'-phosphate
  modified_base 6: mod_base = OTHER; note = guanosine-3'-phosphate
  modified_base 7: mod_base = OTHER; note = guanosine-3'-phosphate
  modified_base 8: mod_base = OTHER; note = adenosine-3'-phosphate
  modified_base 9: mod_base = OTHER; note = guanosine-3'-phosphate
  modified_base 10: mod_base = OTHER; note = guanosine-3'-phosphate
  modified_base 11: mod_base = OTHER; note = adenosine-3'-phosphate
  modified_base 12: mod_base = OTHER; note = uridine-3'-phosphate
  modified_base 13: mod_base = OTHER; note = guanosine-3'-phosphate
  modified_base 14: mod_base = OTHER; note = guanosine-3'-phosphate
  modified_base 15: mod_base = OTHER; note = uridine-3'-phosphate
  modified_base 16: mod_base = OTHER; note = guanosine-3'-phosphate
  modified_base 17: mod_base = OTHER; note = uridine-3'-phosphate
  modified_base 18: mod_base = OTHER; note = cytidine-3'-phosphate
  modified_base 19: mod_base = OTHER; note = cytidine-3'-phosphate
  misc_feature 1..19: note = RNA
  misc_feature 20..21: note = DNA
atccaggaggatggtgtcctt

SEQ ID NO: 599 - DNA, 21 bp, synthetic construct
  source 1..21: mol_type = other DNA
  modified_base 1: mod_base = OTHER; note = cytidine-3'-phosphate
  modified_base 2: mod_base = OTHER; note = cytidine-3'-phosphate
  modified_base 3: mod_base = OTHER; note = uridine-3'-phosphate
  modified_base 4: mod_base = OTHER; note = cytidine-3'-phosphate
  modified_base 5: mod_base = OTHER; note = uridine-3'-phosphate
  modified_base 6: mod_base = OTHER; note = guanosine-3'-phosphate
  modified_base 7: mod_base = OTHER; note = cytidine-3'-phosphate
  modified_base 8: mod_base = OTHER; note = cytidine-3'-phosphate
  modified_base 9: mod_base = OTHER; note = uridine-3'-phosphate
  modified_base 10: mod_base = OTHER; note = cytidine-3'-phosphate
  modified_base 11: mod_base = OTHER; note = uridine-3'-phosphate
  modified_base 12: mod_base = OTHER; note = uridine-3'-phosphate
  modified_base 13: mod_base = OTHER; note = adenosine-3'-phosphate
  modified_base 14: mod_base = OTHER; note = uridine-3'-phosphate
  modified_base 15: mod_base = OTHER; note = cytidine-3'-phosphate
  modified_base 16: mod_base = OTHER; note = cytidine-3'-phosphate
  modified_base 17: mod_base = OTHER; note = adenosine-3'-phosphate
  modified_base 18: mod_base = OTHER; note = guanosine-3'-phosphate
  modified_base 19: mod_base = OTHER; note = guanosine-3'-phosphate
  misc_feature 1..19: note = RNA
  misc_feature 20..21: note = DNA
cctctgcctcttatccaggtt

SEQ ID NO: 600 - DNA, 21 bp, synthetic construct
  source 1..21: mol_type = other DNA
  modified_base 1: mod_base = OTHER; note = uridine-3'-phosphate
  modified_base 2: mod_base = OTHER; note = uridine-3'-phosphate
  modified_base 3: mod_base = OTHER; note = cytidine-3'-phosphate
  modified_base 4: mod_base = OTHER; note = cytidine-3'-phosphate
  modified_base 5: mod_base = OTHER; note = uridine-3'-phosphate
  modified_base 6: mod_base = OTHER; note = cytidine-3'-phosphate
  modified_base 7: mod_base = OTHER; note = cytidine-3'-phosphate
  modified_base 8: mod_base = OTHER; note = cytidine-3'-phosphate
  modified_base 9: mod_base = OTHER; note = guanosine-3'-phosphate
  modified_base 10: mod_base = OTHER; note = guanosine-3'-phosphate
  modified_base 11: mod_base = OTHER; note = cytidine-3'-phosphate
  modified_base 12: mod_base = OTHER; note = cytidine-3'-phosphate
  modified_base 13: mod_base = OTHER; note = uridine-3'-phosphate
  modified_base 14: mod_base = OTHER; note = cytidine-3'-phosphate
  modified_base 15: mod_base = OTHER; note = uridine-3'-phosphate
  modified_base 16: mod_base = OTHER; note = guanosine-3'-phosphate
  modified_base 17: mod_base = OTHER; note = cytidine-3'-phosphate
  modified_base 18: mod_base = OTHER; note = cytidine-3'-phosphate
  modified_base 19: mod_base = OTHER; note = uridine-3'-phosphate
  misc_feature 1..19: note = RNA
  misc_feature 20..21: note = DNA
ttcctcccggcctctgccttt

SEQ ID NO: 601 - DNA, 21 bp, synthetic construct
  source 1..21: mol_type = other DNA
  modified_base 1: mod_base = OTHER; note = cytidine-3'-phosphate
  modified_base 2: mod_base = OTHER; note = guanosine-3'-phosphate
  modified_base 3: mod_base = OTHER; note = guanosine-3'-phosphate
  modified_base 4: mod_base = OTHER; note = cytidine-3'-phosphate
  modified_base 5: mod_base = OTHER; note = uridine-3'-phosphate
  modified_base 6: mod_base = OTHER; note = guanosine-3'-phosphate
  modified_base 7: mod_base = OTHER; note = adenosine-3'-phosphate
  modified_base 8: mod_base = OTHER; note = cytidine-3'-phosphate
  modified_base 9: mod_base = OTHER; note = guanosine-3'-phosphate
  modified_base 10: mod_base = OTHER; note = guanosine-3'-phosphate
  modified_base 11: mod_base = OTHER; note = guanosine-3'-phosphate
  modified_base 12: mod_base = OTHER; note = guanosine-3'-phosphate
  modified_base 13: mod_base = OTHER; note = uridine-3'-phosphate
  modified_base 14: mod_base = OTHER; note = uridine-3'-phosphate
  modified_base 15: mod_base = OTHER; note = cytidine-3'-phosphate
  modified_base 16: mod_base = OTHER; note = cytidine-3'-phosphate
  modified_base 17: mod_base = OTHER; note = uridine-3'-phosphate
  modified_base 18: mod_base = OTHER; note = cytidine-3'-phosphate
  modified_base 19: mod_base = OTHER; note = cytidine-3'-phosphate
  misc_feature 1..19: note = RNA
  misc_feature 20..21: note = DNA
cggctgacggggttcctcctt

SEQ ID NO: 602 - DNA, 21 bp, synthetic construct
  source 1..21: mol_type = other DNA
  modified_base 1: mod_base = OTHER; note = cytidine-3'-phosphate
  modified_base 2: mod_base = OTHER; note = cytidine-3'-phosphate
  modified_base 3: mod_base = OTHER; note = uridine-3'-phosphate
  modified_base 4: mod_base = OTHER; note = guanosine-3'-phosphate
  modified_base 5: mod_base = OTHER; note = cytidine-3'-phosphate
  modified_base 6: mod_base = OTHER; note = cytidine-3'-phosphate
  modified_base 7: mod_base = OTHER; note = cytidine-3'-phosphate
  modified_base 8: mod_base = OTHER; note = guanosine-3'-phosphate
  modified_base 9: mod_base = OTHER; note = cytidine-3'-phosphate
  modified_base 10: mod_base = OTHER; note = cytidine-3'-phosphate
  modified_base 11: mod_base = OTHER; note = cytidine-3'-phosphate
  modified_base 12: mod_base = OTHER; note = guanosine-3'-phosphate
  modified_base 13: mod_base = OTHER; note = guanosine-3'-phosphate
  modified_base 14: mod_base = OTHER; note = cytidine-3'-phosphate
  modified_base 15: mod_base = OTHER; note = uridine-3'-phosphate
  modified_base 16: mod_base = OTHER; note = guanosine-3'-phosphate
  modified_base 17: mod_base = OTHER; note = adenosine-3'-phosphate
  modified_base 18: mod_base = OTHER; note = cytidine-3'-phosphate
  modified_base 19: mod_base = OTHER; note = guanosine-3'-phosphate
  misc_feature 1..19: note = RNA
  misc_feature 20..21: note = DNA
cctgcccgcccggctgacgtt

SEQ ID NO: 603 - DNA, 21 bp, synthetic construct
  source 1..21: mol_type = other DNA
  modified_base 1: mod_base = OTHER; note = uridine-3'-phosphate
  modified_base 2: mod_base = OTHER; note = cytidine-3'-phosphate
  modified_base 3: mod_base = OTHER; note = cytidine-3'-phosphate
  modified_base 4: mod_base = OTHER; note = cytidine-3'-phosphate
  modified_base 5: mod_base = OTHER; note = adenosine-3'-phosphate
  modified_base 6: mod_base = OTHER; note = guanosine-3'-phosphate
  modified_base 7: mod_base = OTHER; note = adenosine-3'-phosphate
  modified_base 8: mod_base = OTHER; note = guanosine-3'-phosphate
  modified_base 9: mod_base = OTHER; note = cytidine-3'-phosphate
  modified_base 10: mod_base = OTHER; note = uridine-3'-phosphate
  modified_base 11: mod_base = OTHER; note = uridine-3'-phosphate
  modified_base 12: mod_base = OTHER; note = cytidine-3'-phosphate
  modified_base 13: mod_base = OTHER; note = cytidine-3'-phosphate
  modified_base 14: mod_base = OTHER; note = uridine-3'-phosphate
  modified_base 15: mod_base = OTHER; note = guanosine-3'-phosphate
  modified_base 16: mod_base = OTHER; note = cytidine-3'-phosphate
  modified_base 17: mod_base = OTHER; note = cytidine-3'-phosphate
  modified_base 18: mod_base = OTHER; note = cytidine-3'-phosphate
  modified_base 19: mod_base = OTHER; note = guanosine-3'-phosphate
  misc_feature 1..19: note = RNA
  misc_feature 20..21: note = DNA
tcccagagcttcctgcccgtt

SEQ ID NO: 604 - DNA, 21 bp, synthetic construct
  source 1..21: mol_type = other DNA
  modified_base 1: mod_base = OTHER; note = cytidine-3'-phosphate
  modified_base 2: mod_base = OTHER; note = cytidine-3'-phosphate
  modified_base 3: mod_base = OTHER; note = adenosine-3'-phosphate
  modified_base 4: mod_base = OTHER; note = uridine-3'-phosphate
  modified_base 5: mod_base = OTHER; note = guanosine-3'-phosphate
  modified_base 6: mod_base = OTHER; note = adenosine-3'-phosphate
  modified_base 7: mod_base = OTHER; note = guanosine-3'-phosphate
  modified_base 8: mod_base = OTHER; note = guanosine-3'-phosphate
  modified_base 9: mod_base = OTHER; note = cytidine-3'-phosphate
  modified_base 10: mod_base = OTHER; note = uridine-3'-phosphate
  modified_base 11: mod_base = OTHER; note = adenosine-3'-phosphate
  modified_base 12: mod_base = OTHER; note = cytidine-3'-phosphate
  modified_base 13: mod_base = OTHER; note = uridine-3'-phosphate
  modified_base 14: mod_base = OTHER; note = cytidine-3'-phosphate
  modified_base 15: mod_base = OTHER; note = cytidine-3'-phosphate
  modified_base 16: mod_base = OTHER; note = cytidine-3'-phosphate
  modified_base 17: mod_base = OTHER; note = adenosine-3'-phosphate
  modified_base 18: mod_base = OTHER; note = guanosine-3'-phosphate
  modified_base 19: mod_base = OTHER; note = adenosine-3'-phosphate
  misc_feature 1..19: note = RNA
  misc_feature 20..21: note = DNA
ccatgaggctactcccagatt

SEQ ID NO: 605 - DNA, 21 bp, synthetic construct
  source 1..21: mol_type = other DNA
  modified_base 1: mod_base = OTHER; note = guanosine-3'-phosphate
  modified_base 2: mod_base = OTHER; note = cytidine-3'-phosphate
  modified_base 3: mod_base = OTHER; note = uridine-3'-phosphate
  modified_base 4: mod_base = OTHER; note = uridine-3'-phosphate
  modified_base 5: mod_base = OTHER; note = cytidine-3'-phosphate
  modified_base 6: mod_base = OTHER; note = uridine-3'-phosphate
  modified_base 7: mod_base = OTHER; note = cytidine-3'-phosphate
  modified_base 8: mod_base = OTHER; note = uridine-3'-phosphate
  modified_base 9: mod_base = OTHER; note = uridine-3'-phosphate
  modified_base 10: mod_base = OTHER; note = cytidine-3'-phosphate
  modified_base 11: mod_base = OTHER; note = cytidine-3'-phosphate
  modified_base 12: mod_base = OTHER; note = adenosine-3'-phosphate
  modified_base 13: mod_base = OTHER; note = uridine-3'-phosphate
  modified_base 14: mod_base = OTHER; note = guanosine-3'-phosphate
  modified_base 15: mod_base = OTHER; note = adenosine-3'-phosphate
  modified_base 16: mod_base = OTHER; note = guanosine-3'-phosphate
  modified_base 17: mod_base = OTHER; note = guanosine-3'-phosphate
  modified_base 18: mod_base = OTHER; note = cytidine-3'-phosphate
  modified_base 19: mod_base = OTHER; note = uridine-3'-phosphate
  misc_feature 1..19: note = RNA
  misc_feature 20..21: note = DNA
gcttctcttccatgaggcttt

SEQ ID NO: 606 - DNA, 21 bp, synthetic construct
  source 1..21: mol_type = other DNA
  modified_base 1: mod_base = OTHER; note = adenosine-3'-phosphate
  modified_base 2: mod_base = OTHER; note = cytidine-3'-phosphate
  modified_base 3: mod_base = OTHER; note = guanosine-3'-phosphate
  modified_base 4: mod_base = OTHER; note = cytidine-3'-phosphate
  modified_base 5: mod_base = OTHER; note = adenosine-3'-phosphate
  modified_base 6: mod_base = OTHER; note = cytidine-3'-phosphate
  modified_base 7: mod_base = OTHER; note = adenosine-3'-phosphate
  modified_base 8: mod_base = OTHER; note = guanosine-3'-phosphate
  modified_base 9: mod_base = OTHER; note = guanosine-3'-phosphate
  modified_base 10: mod_base = OTHER; note = adenosine-3'-phosphate
  modified_base 11: mod_base = OTHER; note = uridine-3'-phosphate
  modified_base 12: mod_base = OTHER; note = cytidine-3'-phosphate
  modified_base 13: mod_base = OTHER; note = uridine-3'-phosphate
  modified_base 14: mod_base = OTHER; note = guanosine-3'-phosphate
  modified_base 15: mod_base = OTHER; note = cytidine-3'-phosphate
  modified_base 16: mod_base = OTHER; note = uridine-3'-phosphate
  modified_base 17: mod_base = OTHER; note = uridine-3'-phosphate
  modified_base 18: mod_base = OTHER; note = cytidine-3'-phosphate
  modified_base 19: mod_base = OTHER; note = uridine-3'-phosphate
  misc_feature 1..19: note = RNA
  misc_feature 20..21: note = DNA
acgcacaggatctgcttcttt

SEQ ID NO: 607 - DNA, 21 bp, synthetic construct
  source 1..21: mol_type = other DNA
  modified_base 1: mod_base = OTHER; note = cytidine-3'-phosphate
  modified_base 2: mod_base = OTHER; note = cytidine-3'-phosphate
  modified_base 3: mod_base = OTHER; note = adenosine-3'-phosphate
  modified_base 4: mod_base = OTHER; note = cytidine-3'-phosphate
  modified_base 5: mod_base = OTHER; note = uridine-3'-phosphate
  modified_base 6: mod_base = OTHER; note = adenosine-3'-phosphate
  modified_base 7: mod_base = OTHER; note = guanosine-3'-phosphate
  modified_base 8: mod_base = OTHER; note = cytidine-3'-phosphate
  modified_base 9: mod_base = OTHER; note = cytidine-3'-phosphate
  modified_base 10: mod_base = OTHER; note = cytidine-3'-phosphate
  modified_base 11: mod_base = OTHER; note = cytidine-3'-phosphate
  modified_base 12: mod_base = OTHER; note = adenosine-3'-phosphate
  modified_base 13: mod_base = OTHER; note = cytidine-3'-phosphate
  modified_base 14: mod_base = OTHER; note = guanosine-3'-phosphate
  modified_base 15: mod_base = OTHER; note = cytidine-3'-phosphate
  modified_base 16: mod_base = OTHER; note = adenosine-3'-phosphate
  modified_base 17: mod_base = OTHER; note = cytidine-3'-phosphate
  modified_base 18: mod_base = OTHER; note = adenosine-3'-phosphate
  modified_base 19: mod_base = OTHER; note = guanosine-3'-phosphate
  misc_feature 1..19: note = RNA
  misc_feature 20..21: note = DNA
ccactagccccacgcacagtt

SEQ ID NO: 608 - DNA, 21 bp, synthetic construct
  source 1..21: mol_type = other DNA
  modified_base 1: mod_base = OTHER; note = adenosine-3'-phosphate
  modified_base 2: mod_base = OTHER; note = cytidine-3'-phosphate
  modified_base 3: mod_base = OTHER; note = guanosine-3'-phosphate
  modified_base 4: mod_base = OTHER; note = uridine-3'-phosphate
  modified_base 5: mod_base = OTHER; note = cytidine-3'-phosphate
  modified_base 6: mod_base = OTHER; note = cytidine-3'-phosphate
  modified_base 7: mod_base = OTHER; note = adenosine-3'-phosphate
  modified_base 8: mod_base = OTHER; note = guanosine-3'-phosphate
  modified_base 9: mod_base = OTHER; note = cytidine-3'-phosphate
  modified_base 10: mod_base = OTHER; note = adenosine-3'-phosphate
  modified_base 11: mod_base = OTHER; note = cytidine-3'-phosphate
  modified_base 12: mod_base = OTHER; note = cytidine-3'-phosphate
  modified_base 13: mod_base = OTHER; note = adenosine-3'-phosphate
  modified_base 14: mod_base = OTHER; note = cytidine-3'-phosphate
  modified_base 15: mod_base = OTHER; note = uridine-3'-phosphate
  modified_base 16: mod_base = OTHER; note = adenosine-3'-phosphate
  modified_base 17: mod_base = OTHER; note = guanosine-3'-phosphate
  modified_base 18: mod_base = OTHER; note = cytidine-3'-phosphate
  modified_base 19: mod_base = OTHER; note = cytidine-3'-phosphate
  misc_feature 1..19: note = RNA
  misc_feature 20..21: note = DNA
acgtccagcaccactagcctt

SEQ ID NO: 609 - DNA, 21 bp, synthetic construct
  source 1..21: mol_type = other DNA
  modified_base 1: mod_base = OTHER; note = adenosine-3'-phosphate
  modified_base 2: mod_base = OTHER; note = cytidine-3'-phosphate
  modified_base 3: mod_base = OTHER; note = cytidine-3'-phosphate
  modified_base 4: mod_base = OTHER; note = adenosine-3'-phosphate
  modified_base 5: mod_base = OTHER; note = guanosine-3'-phosphate
  modified_base 6: mod_base = OTHER; note = guanosine-3'-phosphate
  modified_base 7: mod_base = OTHER; note = cytidine-3'-phosphate
  modified_base 8: mod_base = OTHER; note = uridine-3'-phosphate
  modified_base 9: mod_base = OTHER; note = guanosine-3'-phosphate
  modified_base 10: mod_base = OTHER; note = adenosine-3'-phosphate
  modified_base 11: mod_base = OTHER; note = uridine-3'-phosphate
  modified_base 12: mod_base = OTHER; note = guanosine-3'-phosphate
  modified_base 13: mod_base = OTHER; note = adenosine-3'-phosphate
  modified_base 14: mod_base = OTHER; note = cytidine-3'-phosphate
  modified_base 15: mod_base = OTHER; note = guanosine-3'-phosphate
  modified_base 16: mod_base = OTHER; note = uridine-3'-phosphate
  modified_base 17: mod_base = OTHER; note = cytidine-3'-phosphate
  modified_base 18: mod_base = OTHER; note = cytidine-3'-phosphate
  modified_base 19: mod_base = OTHER; note = adenosine-3'-phosphate
  misc_feature 1..19: note = RNA
  misc_feature 20..21: note = DNA
accaggctgatgacgtccatt

SEQ ID NO: 610 - DNA, 21 bp, synthetic construct
  source 1..21: mol_type = other DNA
  modified_base 1: mod_base = OTHER; note = guanosine-3'-phosphate
  modified_base 2: mod_base = OTHER; note = guanosine-3'-phosphate
  modified_base 3: mod_base = OTHER; note = uridine-3'-phosphate
  modified_base 4: mod_base = OTHER; note = adenosine-3'-phosphate
  modified_base 5: mod_base = OTHER; note = cytidine-3'-phosphate
  modified_base 6: mod_base = OTHER; note = uridine-3'-phosphate
  modified_base 7: mod_base = OTHER; note = uridine-3'-phosphate
  modified_base 8: mod_base = OTHER; note = guanosine-3'-phosphate
  modified_base 9: mod_base = OTHER; note = uridine-3'-phosphate
  modified_base 10: mod_base = OTHER; note = cytidine-3'-phosphate
  modified_base 11: mod_base = OTHER; note = cytidine-3'-phosphate
  modified_base 12: mod_base = OTHER; note = adenosine-3'-phosphate
  modified_base 13: mod_base = OTHER; note = cytidine-3'-phosphate
  modified_base 14: mod_base = OTHER; note = cytidine-3'-phosphate
  modified_base 15: mod_base = OTHER; note = adenosine-3'-phosphate
  modified_base 16: mod_base = OTHER; note = guanosine-3'-phosphate
  modified_base 17: mod_base = OTHER; note = guanosine-3'-phosphate
  modified_base 18: mod_base = OTHER; note = cytidine-3'-phosphate
  modified_base 19: mod_base = OTHER; note = uridine-3'-phosphate
  misc_feature 1..19: note = RNA
  misc_feature 20..21: note = DNA
ggtacttgtccaccaggcttt

SEQ ID NO: 611 - DNA, 21 bp, synthetic construct
  source 1..21: mol_type = other DNA
  modified_base 1: mod_base = OTHER; note = uridine-3'-phosphate
  modified_base 2: mod_base = OTHER; note = cytidine-3'-phosphate
  modified_base 3: mod_base = OTHER; note = cytidine-3'-phosphate
  modified_base 4: mod_base = OTHER; note = uridine-3'-phosphate
  modified_base 5: mod_base = OTHER; note = cytidine-3'-phosphate
  modified_base 6: mod_base = OTHER; note = cytidine-3'-phosphate
  modified_base 7: mod_base = OTHER; note = uridine-3'-phosphate
  modified_base 8: mod_base = OTHER; note = uridine-3'-phosphate
  modified_base 9: mod_base = OTHER; note = adenosine-3'-phosphate
  modified_base 10: mod_base = OTHER; note = guanosine-3'-phosphate
  modified_base 11: mod_base = OTHER; note = guanosine-3'-phosphate
  modified_base 12: mod_base = OTHER; note = guanosine-3'-phosphate
  modified_base 13: mod_base = OTHER; note = uridine-3'-phosphate
  modified_base 14: mod_base = OTHER; note = adenosine-3'-phosphate
  modified_base 15: mod_base = OTHER; note = cytidine-3'-phosphate
  modified_base 16: mod_base = OTHER; note = uridine-3'-phosphate
  modified_base 17: mod_base = OTHER; note = uridine-3'-phosphate
  modified_base 18: mod_base = OTHER; note = guanosine-3'-phosphate
  modified_base 19: mod_base = OTHER; note = uridine-3'-phosphate
  misc_feature 1..19: note = RNA
  misc_feature 20..21: note = DNA
tcctccttagggtacttgttt

SEQ ID NO: 612 - DNA, 21 bp, synthetic construct
  source 1..21: mol_type = other DNA
  modified_base 1: mod_base = OTHER; note = uridine-3'-phosphate
  modified_base 2: mod_base = OTHER; note = uridine-3'-phosphate
  modified_base 3: mod_base = OTHER; note = adenosine-3'-phosphate
  modified_base 4: mod_base = OTHER; note = uridine-3'-phosphate
  modified_base 5: mod_base = OTHER; note = cytidine-3'-phosphate
  modified_base 6: mod_base = OTHER; note = uridine-3'-phosphate
  modified_base 7: mod_base = OTHER; note = cytidine-3'-phosphate
  modified_base 8: mod_base = OTHER; note = cytidine-3'-phosphate
  modified_base 9: mod_base = OTHER; note = guanosine-3'-phosphate
  modified_base 10: mod_base = OTHER; note = adenosine-3'-phosphate
  modified_base 11: mod_base = OTHER; note = guanosine-3'-phosphate
  modified_base 12: mod_base = OTHER; note = uridine-3'-phosphate
  modified_base 13: mod_base = OTHER; note = cytidine-3'-phosphate
  modified_base 14: mod_base = OTHER; note = cytidine-3'-phosphate
  modified_base 15: mod_base = OTHER; note = uridine-3'-phosphate
  modified_base 16: mod_base = OTHER; note = cytidine-3'-phosphate
  modified_base 17: mod_base = OTHER; note = cytidine-3'-phosphate
  modified_base 18: mod_base = OTHER; note = uridine-3'-phosphate
  modified_base 19: mod_base = OTHER; note = uridine-3'-phosphate
  misc_feature 1..19: note = RNA
  misc_feature 20..21: note = DNA
ttatctccgagtcctcctttt

SEQ ID NO: 613 - DNA, 21 bp, synthetic construct
  source 1..21: mol_type = other DNA
  modified_base 1: mod_base = OTHER; note = guanosine-3'-phosphate
  modified_base 2: mod_base = OTHER; note = guanosine-3'-phosphate
  modified_base 3: mod_base = OTHER; note = cytidine-3'-phosphate
  modified_base 4: mod_base = OTHER; note = adenosine-3'-phosphate
  modified_base 5: mod_base = OTHER; note = guanosine-3'-phosphate
  modified_base 6: mod_base = OTHER; note = guanosine-3'-phosphate
  modified_base 7: mod_base = OTHER; note = cytidine-3'-phosphate
  modified_base 8: mod_base = OTHER; note = uridine-3'-phosphate
  modified_base 9: mod_base = OTHER; note = cytidine-3'-phosphate
  modified_base 10: mod_base = OTHER; note = cytidine-3'-phosphate
  modified_base 11: mod_base = OTHER; note = uridine-3'-phosphate
  modified_base 12: mod_base = OTHER; note = uridine-3'-phosphate
  modified_base 13: mod_base = OTHER; note = adenosine-3'-phosphate
  modified_base 14: mod_base = OTHER; note = uridine-3'-phosphate
  modified_base 15: mod_base = OTHER; note = cytidine-3'-phosphate
  modified_base 16: mod_base = OTHER; note = uridine-3'-phosphate
  modified_base 17: mod_base = OTHER; note = cytidine-3'-phosphate
  modified_base 18: mod_base = OTHER; note = cytidine-3'-phosphate
  modified_base 19: mod_base = OTHER; note = guanosine-3'-phosphate
  misc_feature 1..19: note = RNA
  misc_feature 20..21: note = DNA
ggcaggctccttatctccgtt

SEQ ID NO: 614 - DNA, 21 bp, synthetic construct
  source 1..21: mol_type = other DNA
  modified_base 1: mod_base = OTHER; note = cytidine-3'-phosphate
  modified_base 2: mod_base = OTHER; note = adenosine-3'-phosphate
  modified_base 3: mod_base = OTHER; note = guanosine-3'-phosphate
  modified_base 4: mod_base = OTHER; note = adenosine-3'-phosphate
  modified_base 5: mod_base = OTHER; note = cytidine-3'-phosphate
  modified_base 6: mod_base = OTHER; note = adenosine-3'-phosphate
  modified_base 7: mod_base = OTHER; note = cytidine-3'-phosphate
  modified_base 8: mod_base = OTHER; note = adenosine-3'-phosphate
  modified_base 9: mod_base = OTHER; note = uridine-3'-phosphate
  modified_base 10: mod_base = OTHER; note = cytidine-3'-phosphate
  modified_base 11: mod_base = OTHER; note = uridine-3'-phosphate
  modified_base 12: mod_base = OTHER; note = guanosine-3'-phosphate
  modified_base 13: mod_base = OTHER; note = guanosine-3'-phosphate
  modified_base 14: mod_base = OTHER; note = cytidine-3'-phosphate
  modified_base 15: mod_base = OTHER; note = adenosine-3'-phosphate
  modified_base 16: mod_base = OTHER; note = guanosine-3'-phosphate
  modified_base 17: mod_base = OTHER; note = guanosine-3'-phosphate
  modified_base 18: mod_base = OTHER; note = cytidine-3'-phosphate
  modified_base 19: mod_base = OTHER; note = uridine-3'-phosphate
  misc_feature 1..19: note = RNA
  misc_feature 20..21: note = DNA
cagacacatctggcaggcttt

SEQ ID NO: 615 - DNA, 21 bp, synthetic construct
  source 1..21: mol_type = other DNA
  modified_base 1: mod_base = OTHER; note = adenosine-3'-phosphate
  modified_base 2: mod_base = OTHER; note = adenosine-3'-phosphate
  modified_base 3: mod_base = OTHER; note = adenosine-3'-phosphate
  modified_base 4: mod_base = OTHER; note = guanosine-3'-phosphate
  modified_base 5: mod_base = OTHER; note = uridine-3'-phosphate
  modified_base 6: mod_base = OTHER; note = cytidine-3'-phosphate
  modified_base 7: mod_base = OTHER; note = uridine-3'-phosphate
  modified_base 8: mod_base = OTHER; note = guanosine-3'-phosphate
  modified_base 9: mod_base = OTHER; note = uridine-3'-phosphate
  modified_base 10: mod_base = OTHER; note = adenosine-3'-phosphate
  modified_base 11: mod_base = OTHER; note = guanosine-3'-phosphate
  modified_base 12: mod_base = OTHER; note = cytidine-3'-phosphate
  modified_base 13: mod_base = OTHER; note = adenosine-3'-phosphate
  modified_base 14: mod_base = OTHER; note = guanosine-3'-phosphate
  modified_base 15: mod_base = OTHER; note = adenosine-3'-phosphate
  modified_base 16: mod_base = OTHER; note = cytidine-3'-phosphate
  modified_base 17: mod_base = OTHER; note = adenosine-3'-phosphate
  modified_base 18: mod_base = OTHER; note = cytidine-3'-phosphate
  modified_base 19: mod_base = OTHER; note = adenosine-3'-phosphate
  misc_feature 1..19: note = RNA
  misc_feature 20..21: note = DNA
aaagtctgtagcagacacatt

SEQ ID NO: 616 - DNA, 21 bp, synthetic construct
  source 1..21: mol_type = other DNA
  modified_base 1: mod_base = OTHER; note = uridine-3'-phosphate
  modified_base 2: mod_base = OTHER; note = cytidine-3'-phosphate
  modified_base 3: mod_base = OTHER; note = adenosine-3'-phosphate
  modified_base 4: mod_base = OTHER; note = adenosine-3'-phosphate
  modified_base 5: mod_base = OTHER; note = cytidine-3'-phosphate
  modified_base 6: mod_base = OTHER; note = cytidine-3'-phosphate
  modified_base 7: mod_base = OTHER; note = uridine-3'-phosphate
  modified_base 8: mod_base = OTHER; note = uridine-3'-phosphate
  modified_base 9: mod_base = OTHER; note = cytidine-3'-phosphate
  modified_base 10: mod_base = OTHER; note = uridine-3'-phosphate
  modified_base 11: mod_base = OTHER; note = cytidine-3'-phosphate
  modified_base 12: mod_base = OTHER; note = adenosine-3'-phosphate
  modified_base 13: mod_base = OTHER; note = adenosine-3'-phosphate
  modified_base 14: mod_base = OTHER; note = adenosine-3'-phosphate
  modified_base 15: mod_base = OTHER; note = guanosine-3'-phosphate
  modified_base 16: mod_base = OTHER; note = uridine-3'-phosphate
  modified_base 17: mod_base = OTHER; note = cytidine-3'-phosphate
  modified_base 18: mod_base = OTHER; note = uridine-3'-phosphate
  modified_base 19: mod_base = OTHER; note = guanosine-3'-phosphate
  misc_feature 1..19: note = RNA
  misc_feature 20..21: note = DNA
tcaaccttctcaaagtctgtt

SEQ ID NO: 617 - DNA, 21 bp, synthetic construct
  source 1..21: mol_type = other DNA
  modified_base 1: mod_base = OTHER; note = adenosine-3'-phosphate
  modified_base 2: mod_base = OTHER; note = adenosine-3'-phosphate
  modified_base 3: mod_base = OTHER; note = cytidine-3'-phosphate
  modified_base 4: mod_base = OTHER; note = uridine-3'-phosphate
  modified_base 5: mod_base = OTHER; note = guanosine-3'-phosphate
  modified_base 6: mod_base = OTHER; note = guanosine-3'-phosphate
  modified_base 7: mod_base = OTHER; note = guanosine-3'-phosphate
  modified_base 8: mod_base = OTHER; note = uridine-3'-phosphate
  modified_base 9: mod_base = OTHER; note = cytidine-3'-phosphate
  modified_base 10: mod_base = OTHER; note = adenosine-3'-phosphate
  modified_base 11: mod_base = OTHER; note = guanosine-3'-phosphate
  modified_base 12: mod_base = OTHER; note = adenosine-3'-phosphate
  modified_base 13: mod_base = OTHER; note = uridine-3'-phosphate
  modified_base 14: mod_base = OTHER; note = cytidine-3'-phosphate
  modified_base 15: mod_base = OTHER; note = adenosine-3'-phosphate
  modified_base 16: mod_base = OTHER; note = adenosine-3'-phosphate
  modified_base 17: mod_base = OTHER; note = cytidine-3'-phosphate
  modified_base 18: mod_base = OTHER; note = cytidine-3'-phosphate
  modified_base 19: mod_base = OTHER; note = uridine-3'-phosphate
  misc_feature 1..19: note = RNA
  misc_feature 20..21: note = DNA
aactgggtcagatcaaccttt

SEQ ID NO: 618 - DNA, 21 bp, synthetic construct
  source 1..21: mol_type = other DNA
  modified_base 1: mod_base = OTHER; note = guanosine-3'-phosphate
  modified_base 2: mod_base = OTHER; note = guanosine-3'-phosphate
  modified_base 3: mod_base = OTHER; note = adenosine-3'-phosphate
  modified_base 4: mod_base = OTHER; note = uridine-3'-phosphate
  modified_base 5: mod_base = OTHER; note = cytidine-3'-phosphate
  modified_base 6: mod_base = OTHER; note = cytidine-3'-phosphate
  modified_base 7: mod_base = OTHER; note = adenosine-3'-phosphate
  modified_base 8: mod_base = OTHER; note = cytidine-3'-phosphate
  modified_base 9: mod_base = OTHER; note = uridine-3'-phosphate
  modified_base 10: mod_base = OTHER; note = uridine-3'-phosphate
  modified_base 11: mod_base = OTHER; note = guanosine-3'-phosphate
  modified_base 12: mod_base = OTHER; note = adenosine-3'-phosphate
  modified_base 13: mod_base = OTHER; note = adenosine-3'-phosphate
  modified_base 14: mod_base = OTHER; note = cytidine-3'-phosphate
  modified_base 15: mod_base = OTHER; note = uridine-3'-phosphate
  modified_base 16: mod_base = OTHER; note = guanosine-3'-phosphate
  modified_base 17: mod_base = OTHER; note = guanosine-3'-phosphate
  modified_base 18: mod_base = OTHER; note = guanosine-3'-phosphate
  modified_base 19: mod_base = OTHER; note = uridine-3'-phosphate
  misc_feature 1..19: note = RNA
  misc_feature 20..21: note = DNA
ggatccacttgaactgggttt

SEQ ID NO: 619 - DNA, 21 bp, synthetic construct
  source 1..21: mol_type = other DNA
  modified_base 1: mod_base = OTHER; note = cytidine-3'-phosphate
  modified_base 2: mod_base = OTHER; note = cytidine-3'-phosphate
  modified_base 3: mod_base = OTHER; note = cytidine-3'-phosphate
  modified_base 4: mod_base = OTHER; note = uridine-3'-phosphate
  modified_base 5: mod_base = OTHER; note = cytidine-3'-phosphate
  modified_base 6: mod_base = OTHER; note = adenosine-3'-phosphate
  modified_base 7: mod_base = OTHER; note = adenosine-3'-phosphate
  modified_base 8: mod_base = OTHER; note = uridine-3'-phosphate
  modified_base 9: mod_base = OTHER; note = guanosine-3'-phosphate
  modified_base 10: mod_base = OTHER; note = uridine-3'-phosphate
  modified_base 11: mod_base = OTHER; note = guanosine-3'-phosphate
  modified_base 12: mod_base = OTHER; note = guanosine-3'-phosphate
  modified_base 13: mod_base = OTHER; note = adenosine-3'-phosphate
  modified_base 14: mod_base = OTHER; note = uridine-3'-phosphate
  modified_base 15: mod_base = OTHER; note = cytidine-3'-phosphate
  modified_base 16: mod_base = OTHER; note = cytidine-3'-phosphate
  modified_base 17: mod_base = OTHER; note = adenosine-3'-phosphate
  modified_base 18: mod_base = OTHER; note = cytidine-3'-phosphate
  modified_base 19: mod_base = OTHER; note = uridine-3'-phosphate
  misc_feature 1..19: note = RNA
  misc_feature 20..21: note = DNA
ccctcaatgtggatccacttt

SEQ ID NO: 620 - DNA, 21 bp, synthetic construct
  source 1..21: mol_type = other DNA
  modified_base 1: mod_base = OTHER; note = guanosine-3'-phosphate
  modified_base 2: mod_base = OTHER; note = adenosine-3'-phosphate
  modified_base 3: mod_base = OTHER; note = uridine-3'-phosphate
  modified_base 4: mod_base = OTHER; note = guanosine-3'-phosphate
  modified_base 5: mod_base = OTHER; note = cytidine-3'-phosphate
  modified_base 6: mod_base = OTHER; note = guanosine-3'-phosphate
  modified_base 7: mod_base = OTHER; note = uridine-3'-phosphate
  modified_base 8: mod_base = OTHER; note = uridine-3'-phosphate
  modified_base 9: mod_base = OTHER; note = cytidine-3'-phosphate
  modified_base 10: mod_base = OTHER; note = cytidine-3'-phosphate
  modified_base 11: mod_base = OTHER; note = guanosine-3'-phosphate
  modified_base 12: mod_base = OTHER; note = guanosine-3'-phosphate
  modified_base 13: mod_base = OTHER; note = cytidine-3'-phosphate
  modified_base 14: mod_base = OTHER; note = cytidine-3'-phosphate
  modified_base 15: mod_base = OTHER; note = cytidine-3'-phosphate
  modified_base 16: mod_base = OTHER; note = uridine-3'-phosphate
  modified_base 17: mod_base = OTHER; note = cytidine-3'-phosphate
  modified_base 18: mod_base = OTHER; note = adenosine-3'-phosphate
  modified_base 19: mod_base = OTHER; note = adenosine-3'-phosphate
  misc_feature 1..19: note = RNA
  misc_feature 20..21: note = DNA
gatgcgttccggccctcaatt

SEQ ID NO: 621 - DNA, 21 bp, synthetic construct
  source 1..21: mol_type = other DNA
  modified_base 1: mod_base = OTHER; note = uridine-3'-phosphate
  modified_base 2: mod_base = OTHER; note = cytidine-3'-phosphate
  modified_base 3: mod_base = OTHER; note = adenosine-3'-phosphate
  modified_base 4: mod_base = OTHER; note = cytidine-3'-phosphate
  modified_base 5: mod_base = OTHER; note = cytidine-3'-phosphate
  modified_base 6: mod_base = OTHER; note = uridine-3'-phosphate
  modified_base 7: mod_base = OTHER; note = guanosine-3'-phosphate
  modified_base 8: mod_base = OTHER; note = cytidine-3'-phosphate
  modified_base 9: mod_base = OTHER; note = uridine-3'-phosphate
  modified_base 10: mod_base = OTHER; note = cytidine-3'-phosphate
  modified_base 11: mod_base = OTHER; note = cytidine-3'-phosphate
  modified_base 12: mod_base = OTHER; note = guanosine-3'-phosphate
  modified_base 13: mod_base = OTHER; note = adenosine-3'-phosphate
  modified_base 14: mod_base = OTHER; note = uridine-3'-phosphate
  modified_base 15: mod_base = OTHER; note = guanosine-3'-phosphate
  modified_base 16: mod_base = OTHER; note = cytidine-3'-phosphate
  modified_base 17: mod_base = OTHER; note = guanosine-3'-phosphate
  modified_base 18: mod_base = OTHER; note = uridine-3'-phosphate
  modified_base 19: mod_base = OTHER; note = uridine-3'-phosphate
  misc_feature 1..19: note = RNA
  misc_feature 20..21: note = DNA
tcacctgctccgatgcgtttt

SEQ ID NO: 622 - DNA, 21 bp, synthetic construct
  source 1..21: mol_type = other DNA
  modified_base 1: mod_base = OTHER; note = uridine-3'-phosphate
  modified_base 2: mod_base = OTHER; note = guanosine-3'-phosphate
  modified_base 3: mod_base = OTHER; note = cytidine-3'-phosphate
  modified_base 4: mod_base = OTHER; note = adenosine-3'-phosphate
  modified_base 5: mod_base = OTHER; note = guanosine-3'-phosphate
  modified_base 6: mod_base = OTHER; note = cytidine-3'-phosphate
  modified_base 7: mod_base = OTHER; note = adenosine-3'-phosphate
  modified_base 8: mod_base = OTHER; note = uridine-3'-phosphate
  modified_base 9: mod_base = OTHER; note = cytidine-3'-phosphate
  modified_base 10: mod_base = OTHER; note = uridine-3'-phosphate
  modified_base 11: mod_base = OTHER; note = uridine-3'-phosphate
  modified_base 12: mod_base = OTHER; note = cytidine-3'-phosphate
  modified_base 13: mod_base = OTHER; note = adenosine-3'-phosphate
  modified_base 14: mod_base = OTHER; note = cytidine-3'-phosphate
  modified_base 15: mod_base = OTHER; note = cytidine-3'-phosphate
  modified_base 16: mod_base = OTHER; note = uridine-3'-phosphate
  modified_base 17: mod_base = OTHER; note = guanosine-3'-phosphate
  modified_base 18: mod_base = OTHER; note = cytidine-3'-phosphate
  modified_base 19: mod_base = OTHER; note = uridine-3'-phosphate
  misc_feature 1..19: note = RNA
  misc_feature 20..21: note = DNA
tgcagcatcttcacctgcttt

SEQ ID NO: 623 - DNA, 21 bp, synthetic construct
  source 1..21: mol_type = other DNA
  modified_base 1: mod_base = OTHER; note = guanosine-3'-phosphate
  modified_base 2: mod_base = OTHER; note = cytidine-3'-phosphate
  modified_base 3: mod_base = OTHER; note = guanosine-3'-phosphate
  modified_base 4: mod_base = OTHER; note = uridine-3'-phosphate
  modified_base 5: mod_base = OTHER; note = cytidine-3'-phosphate
  modified_base 6: mod_base = OTHER; note = uridine-3'-phosphate
  modified_base 7: mod_base = OTHER; note = adenosine-3'-phosphate
  modified_base 8: mod_base = OTHER; note = uridine-3'-phosphate
  modified_base 9: mod_base = OTHER; note = cytidine-3'-phosphate
  modified_base 10: mod_base = OTHER; note = cytidine-3'-phosphate
  modified_base 11: mod_base = OTHER; note = guanosine-3'-phosphate
  modified_base 12: mod_base = OTHER; note = cytidine-3'-phosphate
  modified_base 13: mod_base = OTHER; note = uridine-3'-phosphate
  modified_base 14: mod_base = OTHER; note = guanosine-3'-phosphate
  modified_base 15: mod_base = OTHER; note = cytidine-3'-phosphate
  modified_base 16: mod_base = OTHER; note = adenosine-3'-phosphate
  modified_base 17: mod_base = OTHER; note = guanosine-3'-phosphate
  modified_base 18: mod_base = OTHER; note = cytidine-3'-phosphate
  modified_base 19: mod_base = OTHER; note = adenosine-3'-phosphate
  misc_feature 1..19: note = RNA
  misc_feature 20..21: note = DNA
gcgtctatccgctgcagcatt

SEQ ID NO: 624 - DNA, 21 bp, synthetic construct
  source 1..21: mol_type = other DNA
  modified_base 1: mod_base = OTHER; note = uridine-3'-phosphate
  modified_base 2: mod_base = OTHER; note = guanosine-3'-phosphate
  modified_base 3: mod_base = OTHER; note = guanosine-3'-phosphate
  modified_base 4: mod_base = OTHER; note = uridine-3'-phosphate
  modified_base 5: mod_base = OTHER; note = guanosine-3'-phosphate
  modified_base 6: mod_base = OTHER; note = uridine-3'-phosphate
  modified_base 7: mod_base = OTHER; note = uridine-3'-phosphate
  modified_base 8: mod_base = OTHER; note = guanosine-3'-phosphate
  modified_base 9: mod_base = OTHER; note = uridine-3'-phosphate
  modified_base 10: mod_base = OTHER; note = guanosine-3'-phosphate
  modified_base 11: mod_base = OTHER; note = uridine-3'-phosphate
  modified_base 12: mod_base = OTHER; note = guanosine-3'-phosphate
  modified_base 13: mod_base = OTHER; note = cytidine-3'-phosphate
  modified_base 14: mod_base = OTHER; note = guanosine-3'-phosphate
  modified_base 15: mod_base = OTHER; note = uridine-3'-phosphate
  modified_base 16: mod_base = OTHER; note = cytidine-3'-phosphate
  modified_base 17: mod_base = OTHER; note = uridine-3'-phosphate
  modified_base 18: mod_base = OTHER; note = adenosine-3'-phosphate
  modified_base 19: mod_base = OTHER; note = uridine-3'-phosphate
  misc_feature 1..19: note = RNA
  misc_feature 20..21: note = DNA
tggtgttgtgtgcgtctattt

SEQ ID NO: 625 - DNA, 21 bp, synthetic construct
  source 1..21: mol_type = other DNA
  modified_base 1: mod_base = OTHER; note = uridine-3'-phosphate
  modified_base 2: mod_base = OTHER; note = cytidine-3'-phosphate
  modified_base 3: mod_base = OTHER; note = uridine-3'-phosphate
  modified_base 4: mod_base = OTHER; note = uridine-3'-phosphate
  modified_base 5: mod_base = OTHER; note = cytidine-3'-phosphate
  modified_base 6: mod_base = OTHER; note = uridine-3'-phosphate
  modified_base 7: mod_base = OTHER; note = guanosine-3'-phosphate
  modified_base 8: mod_base = OTHER; note = cytidine-3'-phosphate
  modified_base 9: mod_base = OTHER; note = uridine-3'-phosphate
  modified_base 10: mod_base = OTHER; note = cytidine-3'-phosphate
  modified_base 11: mod_base = OTHER; note = uridine-3'-phosphate
  modified_base 12: mod_base = OTHER; note = guanosine-3'-phosphate
  modified_base 13: mod_base = OTHER; note = guanosine-3'-phosphate
  modified_base 14: mod_base = OTHER; note = adenosine-3'-phosphate
  modified_base 15: mod_base = OTHER; note = guanosine-3'-phosphate
  modified_base 16: mod_base = OTHER; note = guanosine-3'-phosphate
  modified_base 17: mod_base = OTHER; note = cytidine-3'-phosphate
  modified_base 18: mod_base = OTHER; note = uridine-3'-phosphate
  modified_base 19: mod_base = OTHER; note = guanosine-3'-phosphate
  misc_feature 1..19: note = RNA
  misc_feature 20..21: note = DNA
tcttctgctctggaggctgtt

SEQ ID NO: 626 - DNA, 21 bp, synthetic construct
  source 1..21: mol_type = other DNA
  modified_base 1: mod_base = OTHER; note = adenosine-3'-phosphate
  modified_base 2: mod_base = OTHER; note = cytidine-3'-phosphate
  modified_base 3: mod_base = OTHER; note = guanosine-3'-phosphate
  modified_base 4: mod_base = OTHER; note = guanosine-3'-phosphate
  modified_base 5: mod_base = OTHER; note = adenosine-3'-phosphate
  modified_base 6: mod_base = OTHER; note = cytidine-3'-phosphate
  modified_base 7: mod_base = OTHER; note = adenosine-3'-phosphate
  modified_base 8: mod_base = OTHER; note = cytidine-3'-phosphate
  modified_base 9: mod_base = OTHER; note = cytidine-3'-phosphate
  modified_base 10: mod_base = OTHER; note = cytidine-3'-phosphate
  modified_base 11: mod_base = OTHER; note = guanosine-3'-phosphate
  modified_base 12: mod_base = OTHER; note = guanosine-3'-phosphate
  modified_base 13: mod_base = OTHER; note = adenosine-3'-phosphate
  modified_base 14: mod_base = OTHER; note = uridine-3'-phosphate
  modified_base 15: mod_base = OTHER; note = cytidine-3'-phosphate
  modified_base 16: mod_base = OTHER; note = uridine-3'-phosphate
  modified_base 17: mod_base = OTHER; note = uridine-3'-phosphate
  modified_base 18: mod_base = OTHER; note = cytidine-3'-phosphate
  modified_base 19: mod_base = OTHER; note = uridine-3'-phosphate
  misc_feature 1..19: note = RNA
  misc_feature 20..21: note = DNA
acggacacccggatcttcttt

SEQ ID NO: 627 - DNA, 21 bp, synthetic construct
  source 1..21: mol_type = other DNA
  modified_base 1: mod_base = OTHER; note = uridine-3'-phosphate
  modified_base 2: mod_base = OTHER; note = cytidine-3'-phosphate
  modified_base 3: mod_base = OTHER; note = uridine-3'-phosphate
  modified_base 4: mod_base = OTHER; note = cytidine-3'-phosphate
  modified_base 5: mod_base = OTHER; note = cytidine-3'-phosphate
  modified_base 6: mod_base = OTHER; note = adenosine-3'-phosphate
  modified_base 7: mod_base = OTHER; note = cytidine-3'-phosphate
  modified_base 8: mod_base = OTHER; note = cytidine-3'-phosphate
  modified_base 9: mod_base = OTHER; note = uridine-3'-phosphate
  modified_base 10: mod_base = OTHER; note = cytidine-3'-phosphate
  modified_base 11: mod_base = OTHER; note = cytidine-3'-phosphate
  modified_base 12: mod_base = OTHER; note = adenosine-3'-phosphate
  modified_base 13: mod_base = OTHER; note = cytidine-3'-phosphate
  modified_base 14: mod_base = OTHER; note = guanosine-3'-phosphate
  modified_base 15: mod_base = OTHER; note = guanosine-3'-phosphate
  modified_base 16: mod_base = OTHER; note = adenosine-3'-phosphate
  modified_base 17: mod_base = OTHER; note = cytidine-3'-phosphate
  modified_base 18: mod_base = OTHER; note = adenosine-3'-phosphate
  modified_base 19: mod_base = OTHER; note = cytidine-3'-phosphate
  misc_feature 1..19: note = RNA
  misc_feature 20..21: note = DNA
tctccacctccacggacactt

SEQ ID NO: 628 - DNA, 21 bp, synthetic construct
  source 1..21: mol_type = other DNA
  modified_base 1: mod_base = OTHER; note = uridine-3'-phosphate
  modified_base 2: mod_base = OTHER; note = cytidine-3'-phosphate
  modified_base 3: mod_base = OTHER; note = uridine-3'-phosphate
  modified_base 4: mod_base = OTHER; note = cytidine-3'-phosphate
  modified_base 5: mod_base = OTHER; note = guanosine-3'-phosphate
  modified_base 6: mod_base = OTHER; note = uridine-3'-phosphate
  modified_base 7: mod_base = OTHER; note = guanosine-3'-phosphate
  modified_base 8: mod_base = OTHER; note = guanosine-3'-phosphate
  modified_base 9: mod_base = OTHER; note = cytidine-3'-phosphate
  modified_base 10: mod_base = OTHER; note = uridine-3'-phosphate
  modified_base 11: mod_base = OTHER; note = uridine-3'-phosphate
  modified_base 12: mod_base = OTHER; note = cytidine-3'-phosphate
  modified_base 13: mod_base = OTHER; note = uridine-3'-phosphate
  modified_base 14: mod_base = OTHER; note = cytidine-3'-phosphate
  modified_base 15: mod_base = OTHER; note = cytidine-3'-phosphate
  modified_base 16: mod_base = OTHER; note = adenosine-3'-phosphate
  modified_base 17: mod_base = OTHER; note = cytidine-3'-phosphate
  modified_base 18: mod_base = OTHER; note = cytidine-3'-phosphate
  modified_base 19: mod_base = OTHER; note = uridine-3'-phosphate
  misc_feature 1..19: note = RNA
  misc_feature 20..21: note = DNA
tctcgtggcttctccaccttt

SEQ ID NO: 629 - DNA, 21 bp, synthetic construct
  source 1..21: mol_type = other DNA
  modified_base 1: mod_base = OTHER; note = guanosine-3'-phosphate
  modified_base 2: mod_base = OTHER; note = guanosine-3'-phosphate
  modified_base 3: mod_base = OTHER; note = adenosine-3'-phosphate
  modified_base 4: mod_base = OTHER; note = adenosine-3'-phosphate
  modified_base 5: mod_base = OTHER; note = guanosine-3'-phosphate
  modified_base 6: mod_base = OTHER; note = adenosine-3'-phosphate
  modified_base 7: mod_base = OTHER; note = guanosine-3'-phosphate
  modified_base 8: mod_base = OTHER; note = cytidine-3'-phosphate
  modified_base 9: mod_base = OTHER; note = uridine-3'-phosphate
  modified_base 10: mod_base = OTHER; note = cytidine-3'-phosphate
  modified_base 11: mod_base = OTHER; note = cytidine-3'-phosphate
  modified_base 12: mod_base = OTHER; note = uridine-3'-phosphate
  modified_base 13: mod_base = OTHER; note = cytidine-3'-phosphate
  modified_base 14: mod_base = OTHER; note = uridine-3'-phosphate
  modified_base 15: mod_base = OTHER; note = cytidine-3'-phosphate
  modified_base 16: mod_base = OTHER; note = guanosine-3'-phosphate
  modified_base 17: mod_base = OTHER; note = uridine-3'-phosphate
  modified_base 18: mod_base = OTHER; note = guanosine-3'-phosphate
  modified_base 19: mod_base = OTHER; note = guanosine-3'-phosphate
  misc_feature 1..19: note = RNA
  misc_feature 20..21: note = DNA
ggaagagctcctctcgtggtt

SEQ ID NO: 630 - DNA, 21 bp, synthetic construct
  source 1..21: mol_type = other DNA
  modified_base 1: mod_base = OTHER; note = cytidine-3'-phosphate
  modified_base 2: mod_base = OTHER; note = cytidine-3'-phosphate
  modified_base 3: mod_base = OTHER; note = adenosine-3'-phosphate
  modified_base 4: mod_base = OTHER; note = adenosine-3'-phosphate
  modified_base 5: mod_base = OTHER; note = adenosine-3'-phosphate
  modified_base 6: mod_base = OTHER; note = cytidine-3'-phosphate
  modified_base 7: mod_base = OTHER; note = adenosine-3'-phosphate
  modified_base 8: mod_base = OTHER; note = guanosine-3'-phosphate
  modified_base 9: mod_base = OTHER; note = cytidine-3'-phosphate
  modified_base 10: mod_base = OTHER; note = uridine-3'-phosphate
  modified_base 11: mod_base = OTHER; note = guanosine-3'-phosphate
  modified_base 12: mod_base = OTHER; note = guanosine-3'-phosphate
  modified_base 13: mod_base = OTHER; note = adenosine-3'-phosphate
  modified_base 14: mod_base = OTHER; note = adenosine-3'-phosphate
  modified_base 15: mod_base = OTHER; note = guanosine-3'-phosphate
  modified_base 16: mod_base = OTHER; note = adenosine-3'-phosphate
  modified_base 17: mod_base = OTHER; note = guanosine-3'-phosphate
  modified_base 18: mod_base = OTHER; note = cytidine-3'-phosphate
  modified_base 19: mod_base = OTHER; note = uridine-3'-phosphate
  misc_feature 1..19: note = RNA
  misc_feature 20..21: note = DNA
ccaaacagctggaagagcttt

SEQ ID NO: 631 - DNA, 21 bp, synthetic construct
  source 1..21: mol_type = other DNA
  modified_base 1: mod_base = OTHER; note = adenosine-3'-phosphate
  modified_base 2: mod_base = OTHER; note = cytidine-3'-phosphate
  modified_base 3: mod_base = OTHER; note = guanosine-3'-phosphate
  modified_base 4: mod_base = OTHER; note = uridine-3'-phosphate
  modified_base 5: mod_base = OTHER; note = cytidine-3'-phosphate
  modified_base 6: mod_base = OTHER; note = uridine-3'-phosphate
  modified_base 7: mod_base = OTHER; note = cytidine-3'-phosphate
  modified_base 8: mod_base = OTHER; note = cytidine-3'-phosphate
  modified_base 9: mod_base = OTHER; note = guanosine-3'-phosphate
  modified_base 10: mod_base = OTHER; note = uridine-3'-phosphate
  modified_base 11: mod_base = OTHER; note = adenosine-3'-phosphate
  modified_base 12: mod_base = OTHER; note = guanosine-3'-phosphate
  modified_base 13: mod_base = OTHER; note = cytidine-3'-phosphate
  modified_base 14: mod_base = OTHER; note = cytidine-3'-phosphate
  modified_base 15: mod_base = OTHER; note = adenosine-3'-phosphate
  modified_base 16: mod_base = OTHER; note = adenosine-3'-phosphate
  modified_base 17: mod_base = OTHER; note = adenosine-3'-phosphate
  modified_base 18: mod_base = OTHER; note = cytidine-3'-phosphate
  modified_base 19: mod_base = OTHER; note = adenosine-3'-phosphate
  misc_feature 1..19: note = RNA
  misc_feature 20..21: note = DNA
acgtctccgtagccaaacatt

SEQ ID NO: 632 - DNA, 21 bp, synthetic construct
  source 1..21: mol_type = other DNA
  modified_base 1: mod_base = OTHER; note = uridine-3'-phosphate
  modified_base 2: mod_base = OTHER; note = guanosine-3'-phosphate
  modified_base 3: mod_base = OTHER; note = adenosine-3'-phosphate
  modified_base 4: mod_base = OTHER; note = cytidine-3'-phosphate
  modified_base 5: mod_base = OTHER; note = adenosine-3'-phosphate
  modified_base 6: mod_base = OTHER; note = adenosine-3'-phosphate
  modified_base 7: mod_base = OTHER; note = adenosine-3'-phosphate
  modified_base 8: mod_base = OTHER; note = cytidine-3'-phosphate
  modified_base 9: mod_base = OTHER; note = adenosine-3'-phosphate
  modified_base 10: mod_base = OTHER; note = cytidine-3'-phosphate
  modified_base 11: mod_base = OTHER; note = cytidine-3'-phosphate
  modified_base 12: mod_base = OTHER; note = adenosine-3'-phosphate
  modified_base 13: mod_base = OTHER; note = cytidine-3'-phosphate
  modified_base 14: mod_base = OTHER; note = guanosine-3'-phosphate
  modified_base 15: mod_base = OTHER; note = uridine-3'-phosphate
  modified_base 16: mod_base = OTHER; note = cytidine-3'-phosphate
  modified_base 17: mod_base = OTHER; note = uridine-3'-phosphate
  modified_base 18: mod_base = OTHER; note = cytidine-3'-phosphate
  modified_base 19: mod_base = OTHER; note = cytidine-3'-phosphate
  misc_feature 1..19: note = RNA
  misc_feature 20..21: note = DNA
tgacaaacaccacgtctcctt

SEQ ID NO: 633 - DNA, 21 bp, synthetic construct
  source 1..21: mol_type = other DNA
  modified_base 1: mod_base = OTHER; note = cytidine-3'-phosphate
  modified_base 2: mod_base = OTHER; note = cytidine-3'-phosphate
  modified_base 3: mod_base = OTHER; note = adenosine-3'-phosphate
  modified_base 4: mod_base = OTHER; note = cytidine-3'-phosphate
  modified_base 5: mod_base = OTHER; note = adenosine-3'-phosphate
  modified_base 6: mod_base = OTHER; note = uridine-3'-phosphate
  modified_base 7: mod_base = OTHER; note = cytidine-3'-phosphate
  modified_base 8: mod_base = OTHER; note = uridine-3'-phosphate
  modified_base 9: mod_base = OTHER; note = uridine-3'-phosphate
  modified_base 10: mod_base = OTHER; note = uridine-3'-phosphate
  modified_base 11: mod_base = OTHER; note = guanosine-3'-phosphate
  modified_base 12: mod_base = OTHER; note = cytidine-3'-phosphate
  modified_base 13: mod_base = OTHER; note = uridine-3'-phosphate
  modified_base 14: mod_base = OTHER; note = guanosine-3'-phosphate
  modified_base 15: mod_base = OTHER; note = adenosine-3'-phosphate
  modified_base 16: mod_base = OTHER; note = cytidine-3'-phosphate
  modified_base 17: mod_base = OTHER; note = adenosine-3'-phosphate
  modified_base 18: mod_base = OTHER; note = adenosine-3'-phosphate
  modified_base 19: mod_base = OTHER; note = adenosine-3'-phosphate
  misc_feature 1..19: note = RNA
  misc_feature 20..21: note = DNA
ccacatctttgctgacaaatt

SEQ ID NO: 634 - DNA, 21 bp, synthetic construct
  source 1..21: mol_type = other DNA
  modified_base 1: mod_base = OTHER; note = adenosine-3'-phosphate
  modified_base 2: mod_base = OTHER; note = guanosine-3'-phosphate
  modified_base 3: mod_base = OTHER; note = uridine-3'-phosphate
  modified_base 4: mod_base = OTHER; note = guanosine-3'-phosphate
  modified_base 5: mod_base = OTHER; note = cytidine-3'-phosphate
  modified_base 6: mod_base = OTHER; note = uridine-3'-phosphate
  modified_base 7: mod_base = OTHER; note = uridine-3'-phosphate
  modified_base 8: mod_base = OTHER; note = guanosine-3'-phosphate
  modified_base 9: mod_base = OTHER; note = guanosine-3'-phosphate
  modified_base 10: mod_base = OTHER; note = cytidine-3'-phosphate
  modified_base 11: mod_base = OTHER; note = cytidine-3'-phosphate
  modified_base 12: mod_base = OTHER; note = adenosine-3'-phosphate
  modified_base 13: mod_base = OTHER; note = cytidine-3'-phosphate
  modified_base 14: mod_base = OTHER; note = adenosine-3'-phosphate
  modified_base 15: mod_base = OTHER; note = uridine-3'-phosphate
  modified_base 16: mod_base = OTHER; note = cytidine-3'-phosphate
  modified_base 17: mod_base = OTHER; note = uridine-3'-phosphate
  modified_base 18: mod_base = OTHER; note = uridine-3'-phosphate
  modified_base 19: mod_base = OTHER; note = uridine-3'-phosphate
  misc_feature 1..19: note = RNA
  misc_feature 20..21: note = DNA
agtgcttggccacatcttttt

SEQ ID NO: 635 - DNA, 21 bp, synthetic construct
  source 1..21: mol_type = other DNA
  modified_base 1: mod_base = OTHER; note = adenosine-3'-phosphate
  modified_base 2: mod_base = OTHER; note = cytidine-3'-phosphate
  modified_base 3: mod_base = OTHER; note = uridine-3'-phosphate
  modified_base 4: mod_base = OTHER; note = guanosine-3'-phosphate
  modified_base 5: mod_base = OTHER; note = guanosine-3'-phosphate
  modified_base 6: mod_base = OTHER; note = adenosine-3'-phosphate
  modified_base 7: mod_base = OTHER; note = adenosine-3'-phosphate
  modified_base 8: mod_base = OTHER; note = cytidine-3'-phosphate
  modified_base 9: mod_base = OTHER; note = cytidine-3'-phosphate
  modified_base 10: mod_base = OTHER; note = cytidine-3'-phosphate
  modified_base 11: mod_base = OTHER; note = cytidine-3'-phosphate
  modified_base 12: mod_base = OTHER; note = adenosine-3'-phosphate
  modified_base 13: mod_base = OTHER; note = adenosine-3'-phosphate
  modified_base 14: mod_base = OTHER; note = guanosine-3'-phosphate
  modified_base 15: mod_base = OTHER; note = uridine-3'-phosphate
  modified_base 16: mod_base = OTHER; note = guanosine-3'-phosphate
  modified_base 17: mod_base = OTHER; note = cytidine-3'-phosphate
  modified_base 18: mod_base = OTHER; note = uridine-3'-phosphate
  modified_base 19: mod_base = OTHER; note = uridine-3'-phosphate
  misc_feature 1..19: note = RNA
  misc_feature 20..21: note = DNA
actggaaccccaagtgctttt

SEQ ID NO: 636 - DNA, 21 bp, synthetic construct
  source 1..21: mol_type = other DNA
  modified_base 1: mod_base = OTHER; note = cytidine-3'-phosphate
  modified_base 2: mod_base = OTHER; note = uridine-3'-phosphate
  modified_base 3: mod_base = OTHER; note = uridine-3'-phosphate
  modified_base 4: mod_base = OTHER; note = cytidine-3'-phosphate
  modified_base 5: mod_base = OTHER; note = cytidine-3'-phosphate
  modified_base 6: mod_base = OTHER; note = uridine-3'-phosphate
  modified_base 7: mod_base = OTHER; note = cytidine-3'-phosphate
  modified_base 8: mod_base = OTHER; note = uridine-3'-phosphate
  modified_base 9: mod_base = OTHER; note = guanosine-3'-phosphate
  modified_base 10: mod_base = OTHER; note = cytidine-3'-phosphate
  modified_base 11: mod_base = OTHER; note = uridine-3'-phosphate
  modified_base 12: mod_base = OTHER; note = guanosine-3'-phosphate
  modified_base 13: mod_base = OTHER; note = adenosine-3'-phosphate
  modified_base 14: mod_base = OTHER; note = cytidine-3'-phosphate
  modified_base 15: mod_base = OTHER; note = uridine-3'-phosphate
  modified_base 16: mod_base = OTHER; note = guanosine-3'-phosphate
  modified_base 17: mod_base = OTHER; note = guanosine-3'-phosphate
  modified_base 18: mod_base = OTHER; note = adenosine-3'-phosphate
  modified_base 19: mod_base = OTHER; note = adenosine-3'-phosphate
  misc_feature 1..19: note = RNA
  misc_feature 20..21: note = DNA
cttcctctgctgactggaatt

SEQ ID NO: 637 - DNA, 21 bp, synthetic construct
  source 1..21: mol_type = other DNA
  modified_base 1: mod_base = OTHER; note = guanosine-3'-phosphate
  modified_base 2: mod_base = OTHER; note = cytidine-3'-phosphate
  modified_base 3: mod_base = OTHER; note = cytidine-3'-phosphate
  modified_base 4: mod_base = OTHER; note = cytidine-3'-phosphate
  modified_base 5: mod_base = OTHER; note = cytidine-3'-phosphate
  modified_base 6: mod_base = OTHER; note = uridine-3'-phosphate
  modified_base 7: mod_base = OTHER; note = cytidine-3'-phosphate
  modified_base 8: mod_base = OTHER; note = adenosine-3'-phosphate
  modified_base 9: mod_base = OTHER; note = adenosine-3'-phosphate
  modified_base 10: mod_base = OTHER; note = guanosine-3'-phosphate
  modified_base 11: mod_base = OTHER; note = guanosine-3'-phosphate
  modified_base 12: mod_base = OTHER; note = cytidine-3'-phosphate
  modified_base 13: mod_base = OTHER; note = uridine-3'-phosphate
  modified_base 14: mod_base = OTHER; note = uridine-3'-phosphate
  modified_base 15: mod_base = OTHER; note = cytidine-3'-phosphate
  modified_base 16: mod_base = OTHER; note = cytidine-3'-phosphate
  modified_base 17: mod_base = OTHER; note = uridine-3'-phosphate
  modified_base 18: mod_base = OTHER; note = cytidine-3'-phosphate
  modified_base 19: mod_base = OTHER; note = uridine-3'-phosphate
  misc_feature 1..19: note = RNA
  misc_feature 20..21: note = DNA
gcccctcaaggcttcctcttt

SEQ ID NO: 638 - DNA, 21 bp, synthetic construct
  source 1..21: mol_type = other DNA
  modified_base 1: mod_base = OTHER; note = guanosine-3'-phosphate
  modified_base 2: mod_base = OTHER; note = adenosine-3'-phosphate
  modified_base 3: mod_base = OTHER; note = cytidine-3'-phosphate
  modified_base 4: mod_base = OTHER; note = cytidine-3'-phosphate
  modified_base 5: mod_base = OTHER; note = adenosine-3'-phosphate
  modified_base 6: mod_base = OTHER; note = uridine-3'-phosphate
  modified_base 7: mod_base = OTHER; note = adenosine-3'-phosphate
  modified_base 8: mod_base = OTHER; note = cytidine-3'-phosphate
  modified_base 9: mod_base = OTHER; note = adenosine-3'-phosphate
  modified_base 10: mod_base = OTHER; note = adenosine-3'-phosphate
  modified_base 11: mod_base = OTHER; note = guanosine-3'-phosphate
  modified_base 12: mod_base = OTHER; note = cytidine-3'-phosphate
  modified_base 13: mod_base = OTHER; note = cytidine-3'-phosphate
  modified_base 14: mod_base = OTHER; note = cytidine-3'-phosphate
  modified_base 15: mod_base = OTHER; note = cytidine-3'-phosphate
  modified_base 16: mod_base = OTHER; note = uridine-3'-phosphate
  modified_base 17: mod_base = OTHER; note = cytidine-3'-phosphate
  modified_base 18: mod_base = OTHER; note = adenosine-3'-phosphate
  modified_base 19: mod_base = OTHER; note = adenosine-3'-phosphate
  misc_feature 1..19: note = RNA
  misc_feature 20..21: note = DNA
gaccatacaagcccctcaatt

SEQ ID NO: 639 - DNA, 21 bp, synthetic construct
  source 1..21: mol_type = other DNA
  modified_base 1: mod_base = OTHER; note = cytidine-3'-phosphate
  modified_base 2: mod_base = OTHER; note = uridine-3'-phosphate
  modified_base 3: mod_base = OTHER; note = uridine-3'-phosphate
  modified_base 4: mod_base = OTHER; note = uridine-3'-phosphate
  modified_base 5: mod_base = OTHER; note = cytidine-3'-phosphate
  modified_base 6: mod_base = OTHER; note = cytidine-3'-phosphate
  modified_base 7: mod_base = OTHER; note = uridine-3'-phosphate
  modified_base 8: mod_base = OTHER; note = cytidine-3'-phosphate
  modified_base 9: mod_base = OTHER; note = adenosine-3'-phosphate
  modified_base 10: mod_base = OTHER; note = cytidine-3'-phosphate
  modified_base 11: mod_base = OTHER; note = adenosine-3'-phosphate
  modified_base 12: mod_base = OTHER; note = cytidine-3'-phosphate
  modified_base 13: mod_base = OTHER; note = guanosine-3'-phosphate
  modified_base 14: mod_base = OTHER; note = adenosine-3'-phosphate
  modified_base 15: mod_base = OTHER; note = cytidine-3'-phosphate
  modified_base 16: mod_base = OTHER; note = cytidine-3'-phosphate
  modified_base 17: mod_base = OTHER; note = adenosine-3'-phosphate
  modified_base 18: mod_base = OTHER; note = uridine-3'-phosphate
  modified_base 19: mod_base = OTHER; note = adenosine-3'-phosphate
  misc_feature 1..19: note = RNA
  misc_feature 20..21: note = DNA
ctttcctcacacgaccatatt

SEQ ID NO: 640 - DNA, 21 bp, synthetic construct
  source 1..21: mol_type = other DNA
  modified_base 1: mod_base = OTHER; note = adenosine-3'-phosphate
  modified_base 2: mod_base = OTHER; note = guanosine-3'-phosphate
  modified_base 3: mod_base = OTHER; note = cytidine-3'-phosphate
  modified_base 4: mod_base = OTHER; note = adenosine-3'-phosphate
  modified_base 5: mod_base = OTHER; note = cytidine-3'-phosphate
  modified_base 6: mod_base = OTHER; note = adenosine-3'-phosphate
  modified_base 7: mod_base = OTHER; note = guanosine-3'-phosphate
  modified_base 8: mod_base = OTHER; note = cytidine-3'-phosphate
  modified_base 9: mod_base = OTHER; note = cytidine-3'-phosphate
  modified_base 10: mod_base = OTHER; note = cytidine-3'-phosphate
  modified_base 11: mod_base = OTHER; note = cytidine-3'-phosphate
  modified_base 12: mod_base = OTHER; note = uridine-3'-phosphate
  modified_base 13: mod_base = OTHER; note = uridine-3'-phosphate
  modified_base 14: mod_base = OTHER; note = uridine-3'-phosphate
  modified_base 15: mod_base = OTHER; note = cytidine-3'-phosphate
  modified_base 16: mod_base = OTHER; note = cytidine-3'-phosphate
  modified_base 17: mod_base = OTHER; note = uridine-3'-phosphate
  modified_base 18: mod_base = OTHER; note = cytidine-3'-phosphate
  modified_base 19: mod_base = OTHER; note = adenosine-3'-phosphate
  misc_feature 1..19: note = RNA
  misc_feature 20..21: note = DNA
agcacagcccctttcctcatt

SEQ ID NO: 641 - DNA, 21 bp, synthetic construct
  source 1..21: mol_type = other DNA
  modified_base 1: mod_base = OTHER; note = cytidine-3'-phosphate
  modified_base 2: mod_base = OTHER; note = uridine-3'-phosphate
  modified_base 3: mod_base = OTHER; note = cytidine-3'-phosphate
  modified_base 4: mod_base = OTHER; note = cytidine-3'-phosphate
  modified_base 5: mod_base = OTHER; note = uridine-3'-phosphate
  modified_base 6: mod_base = OTHER; note = cytidine-3'-phosphate
  modified_base 7: mod_base = OTHER; note = adenosine-3'-phosphate
  modified_base 8: mod_base = OTHER; note = guanosine-3'-phosphate
  modified_base 9: mod_base = OTHER; note = cytidine-3'-phosphate
  modified_base 10: mod_base = OTHER; note = cytidine-3'-phosphate
  modified_base 11: mod_base = OTHER; note = cytidine-3'-phosphate
  modified_base 12: mod_base = OTHER; note = adenosine-3'-phosphate
  modified_base 13: mod_base = OTHER; note = guanosine-3'-phosphate
  modified_base 14: mod_base = OTHER; note = guanosine-3'-phosphate
  modified_base 15: mod_base = OTHER; note = cytidine-3'-phosphate
  modified_base 16: mod_base = OTHER; note = adenosine-3'-phosphate
  modified_base 17: mod_base = OTHER; note = cytidine-3'-phosphate
  modified_base 18: mod_base = OTHER; note = adenosine-3'-phosphate
  modified_base 19: mod_base = OTHER; note = guanosine-3'-phosphate
  misc_feature 1..19: note = RNA
  misc_feature 20..21: note = DNA
ctcctcagcccaggcacagtt

SEQ ID NO: 642 - DNA, 21 bp, synthetic construct
  source 1..21: mol_type = other DNA
  modified_base 1: mod_base = OTHER; note = guanosine-3'-phosphate
  modified_base 2: mod_base = OTHER; note = guanosine-3'-phosphate
  modified_base 3: mod_base = OTHER; note = cytidine-3'-phosphate
  modified_base 4: mod_base = OTHER; note = guanosine-3'-phosphate
  modified_base 5: mod_base = OTHER; note = uridine-3'-phosphate
  modified_base 6: mod_base = OTHER; note = cytidine-3'-phosphate
  modified_base 7: mod_base = OTHER; note = guanosine-3'-phosphate
  modified_base 8: mod_base = OTHER; note = guanosine-3'-phosphate
  modified_base 9: mod_base = OTHER; note = cytidine-3'-phosphate
  modified_base 10: mod_base = OTHER; note = guanosine-3'-phosphate
  modified_base 11: mod_base = OTHER; note = cytidine-3'-phosphate
  modified_base 12: mod_base = OTHER; note = cytidine-3'-phosphate
  modified_base 13: mod_base = OTHER; note = cytidine-3'-phosphate
  modified_base 14: mod_base = OTHER; note = uridine-3'-phosphate
  modified_base 15: mod_base = OTHER; note = cytidine-3'-phosphate
  modified_base 16: mod_base = OTHER; note = cytidine-3'-phosphate
  modified_base 17: mod_base = OTHER; note = uridine-3'-phosphate
  modified_base 18: mod_base = OTHER; note = cytidine-3'-phosphate
  modified_base 19: mod_base = OTHER; note = adenosine-3'-phosphate
  misc_feature 1..19: note = RNA
  misc_feature 20..21: note = DNA
ggcgtcggcgccctcctcatt

SEQ ID NO: 643 - DNA, 21 bp, synthetic construct
  source 1..21: mol_type = other DNA
  modified_base 1: mod_base = OTHER; note = uridine-3'-phosphate
  modified_base 2: mod_base = OTHER; note = cytidine-3'-phosphate
  modified_base 3: mod_base = OTHER; note = adenosine-3'-phosphate
  modified_base 4: mod_base = OTHER; note = guanosine-3'-phosphate
  modified_base 5: mod_base = OTHER; note = guanosine-3'-phosphate
  modified_base 6: mod_base = OTHER; note = guanosine-3'-phosphate
  modified_base 7: mod_base = OTHER; note = cytidine-3'-phosphate
  modified_base 8: mod_base = OTHER; note = cytidine-3'-phosphate
  modified_base 9: mod_base = OTHER; note = cytidine-3'-phosphate
  modified_base 10: mod_base = OTHER; note = adenosine-3'-phosphate
  modified_base 11: mod_base = OTHER; note = guanosine-3'-phosphate
  modified_base 12: mod_base = OTHER; note = guanosine-3'-phosphate
  modified_base 13: mod_base = OTHER; note = guanosine-3'-phosphate
  modified_base 14: mod_base = OTHER; note = cytidine-3'-phosphate
  modified_base 15: mod_base = OTHER; note = guanosine-3'-phosphate
  modified_base 16: mod_base = OTHER; note = uridine-3'-phosphate
  modified_base 17: mod_base = OTHER; note = cytidine-3'-phosphate
  modified_base 18: mod_base = OTHER; note = guanosine-3'-phosphate
  modified_base 19: mod_base = OTHER; note = guanosine-3'-phosphate
  misc_feature 1..19: note = RNA
  misc_feature 20..21: note = DNA
tcagggcccagggcgtcggtt

SEQ ID NO: 644 - DNA, 21 bp, synthetic construct
  source 1..21: mol_type = other DNA
  modified_base 1: mod_base = OTHER; note = adenosine-3'-phosphate
  modified_base 2: mod_base = OTHER; note = adenosine-3'-phosphate
  modified_base 3: mod_base = OTHER; note = uridine-3'-phosphate
  modified_base 4: mod_base = OTHER; note = uridine-3'-phosphate
  modified_base 5: mod_base = OTHER; note = uridine-3'-phosphate
  modified_base 6: mod_base = OTHER; note = guanosine-3'-phosphate
  modified_base 7: mod_base = OTHER; note = cytidine-3'-phosphate
  modified_base 8: mod_base = OTHER; note = cytidine-3'-phosphate
  modified_base 9: mod_base = OTHER; note = adenosine-3'-phosphate
  modified_base 10: mod_base = OTHER; note = uridine-3'-phosphate
  modified_base 11: mod_base = OTHER; note = cytidine-3'-phosphate
  modified_base 12: mod_base = OTHER; note = adenosine-3'-phosphate
  modified_base 13: mod_base = OTHER; note = guanosine-3'-phosphate
  modified_base 14: mod_base = OTHER; note = guanosine-3'-phosphate
  modified_base 15: mod_base = OTHER; note = guanosine-3'-phosphate
  modified_base 16: mod_base = OTHER; note = cytidine-3'-phosphate
  modified_base 17: mod_base = OTHER; note = cytidine-3'-phosphate
  modified_base 18: mod_base = OTHER; note = cytidine-3'-phosphate
  modified_base 19: mod_base = OTHER; note = adenosine-3'-phosphate
  misc_feature 1..19: note = RNA
  misc_feature 20..21: note = DNA
aatttgccatcagggcccatt

SEQ ID NO: 645 - DNA, 21 bp, synthetic construct
  source 1..21: mol_type = other DNA
  modified_base 1: mod_base = OTHER; note = adenosine-3'-phosphate
  modified_base 2: mod_base = OTHER; note = uridine-3'-phosphate
  modified_base 3: mod_base = OTHER; note = cytidine-3'-phosphate
  modified_base 4: mod_base = OTHER; note = cytidine-3'-phosphate
  modified_base 5: mod_base = OTHER; note = guanosine-3'-phosphate
  modified_base 6: mod_base = OTHER; note = adenosine-3'-phosphate
  modified_base 7: mod_base = OTHER; note = guanosine-3'-phosphate
  modified_base 8: mod_base = OTHER; note = uridine-3'-phosphate
  modified_base 9: mod_base = OTHER; note = guanosine-3'-phosphate
  modified_base 10: mod_base = OTHER; note = guanosine-3'-phosphate
  modified_base 11: mod_base = OTHER; note = adenosine-3'-phosphate
  modified_base 12: mod_base = OTHER; note = guanosine-3'-phosphate
  modified_base 13: mod_base = OTHER; note = cytidine-3'-phosphate
  modified_base 14: mod_base = OTHER; note = adenosine-3'-phosphate
  modified_base 15: mod_base = OTHER; note = adenosine-3'-phosphate
  modified_base 16: mod_base = OTHER; note = uridine-3'-phosphate
  modified_base 17: mod_base = OTHER; note = uridine-3'-phosphate
  modified_base 18: mod_base = OTHER; note = uridine-3'-phosphate
  modified_base 19: mod_base = OTHER; note = guanosine-3'-phosphate
  misc_feature 1..19: note = RNA
  misc_feature 20..21: note = DNA
atccgagtggagcaatttgtt

SEQ ID NO: 646 - DNA, 21 bp, synthetic construct
  source 1..21: mol_type = other DNA
  modified_base 1: mod_base = OTHER; note = guanosine-3'-phosphate
  modified_base 2: mod_base = OTHER; note = guanosine-3'-phosphate
  modified_base 3: mod_base = OTHER; note = cytidine-3'-phosphate
  modified_base 4: mod_base = OTHER; note = guanosine-3'-phosphate
  modified_base 5: mod_base = OTHER; note = guanosine-3'-phosphate
  modified_base 6: mod_base = OTHER; note = guanosine-3'-phosphate
  modified_base 7: mod_base = OTHER; note = adenosine-3'-phosphate
  modified_base 8: mod_base = OTHER; note = adenosine-3'-phosphate
  modified_base 9: mod_base = OTHER; note = adenosine-3'-phosphate
  modified_base 10: mod_base = OTHER; note = guanosine-3'-phosphate
  modified_base 11: mod_base = OTHER; note = cytidine-3'-phosphate
  modified_base 12: mod_base = OTHER; note = adenosine-3'-phosphate
  modified_base 13: mod_base = OTHER; note = uridine-3'-phosphate
  modified_base 14: mod_base = OTHER; note = cytidine-3'-phosphate
  modified_base 15: mod_base = OTHER; note = cytidine-3'-phosphate
  modified_base 16: mod_base = OTHER; note = guanosine-3'-phosphate
  modified_base 17: mod_base = OTHER; note = adenosine-3'-phosphate
  modified_base 18: mod_base = OTHER; note = guanosine-3'-phosphate
  modified_base 19: mod_base = OTHER; note = uridine-3'-phosphate
  misc_feature 1..19: note = RNA
  misc_feature 20..21: note = DNA
ggcgggaaagcatccgagttt

SEQ ID NO: 647 - DNA, 21 bp, synthetic construct
  source 1..21: mol_type = other DNA
  modified_base 1: mod_base = OTHER; note = cytidine-3'-phosphate
  modified_base 2: mod_base = OTHER; note = adenosine-3'-phosphate
  modified_base 3: mod_base = OTHER; note = cytidine-3'-phosphate
  modified_base 4: mod_base = OTHER; note = guanosine-3'-phosphate
  modified_base 5: mod_base = OTHER; note = cytidine-3'-phosphate
  modified_base 6: mod_base = OTHER; note = guanosine-3'-phosphate
  modified_base 7: mod_base = OTHER; note = guanosine-3'-phosphate
  modified_base 8: mod_base = OTHER; note = guanosine-3'-phosphate
  modified_base 9: mod_base = OTHER; note = guanosine-3'-phosphate
  modified_base 10: mod_base = OTHER; note = uridine-3'-phosphate
  modified_base 11: mod_base = OTHER; note = guanosine-3'-phosphate
  modified_base 12: mod_base = OTHER; note = guanosine-3'-phosphate
  modified_base 13: mod_base = OTHER; note = cytidine-3'-phosphate
  modified_base 14: mod_base = OTHER; note = guanosine-3'-phosphate
  modified_base 15: mod_base = OTHER; note = guanosine-3'-phosphate
  modified_base 16: mod_base = OTHER; note = guanosine-3'-phosphate
  modified_base 17: mod_base = OTHER; note = adenosine-3'-phosphate
  modified_base 18: mod_base = OTHER; note = adenosine-3'-phosphate
  modified_base 19: mod_base = OTHER; note = adenosine-3'-phosphate
  misc_feature 1..19: note = RNA
  misc_feature 20..21: note = DNA
cacgcggggtggcgggaaatt

SEQ ID NO: 648 - DNA, 21 bp, synthetic construct
  source 1..21: mol_type = other DNA
  modified_base 1: mod_base = OTHER; note = cytidine-3'-phosphate
  modified_base 2: mod_base = OTHER; note = adenosine-3'-phosphate
  modified_base 3: mod_base = OTHER; note = guanosine-3'-phosphate
  modified_base 4: mod_base = OTHER; note = uridine-3'-phosphate
  modified_base 5: mod_base = OTHER; note = guanosine-3'-phosphate
  modified_base 6: mod_base = OTHER; note = uridine-3'-phosphate
  modified_base 7: mod_base = OTHER; note = adenosine-3'-phosphate
  modified_base 8: mod_base = OTHER; note = uridine-3'-phosphate
  modified_base 9: mod_base = OTHER; note = cytidine-3'-phosphate
  modified_base 10: mod_base = OTHER; note = cytidine-3'-phosphate
  modified_base 11: mod_base = OTHER; note = adenosine-3'-phosphate
  modified_base 12: mod_base = OTHER; note = cytidine-3'-phosphate
  modified_base 13: mod_base = OTHER; note = cytidine-3'-phosphate
  modified_base 14: mod_base = OTHER; note = adenosine-3'-phosphate
  modified_base 15: mod_base = OTHER; note = cytidine-3'-phosphate
  modified_base 16: mod_base = OTHER; note = guanosine-3'-phosphate
  modified_base 17: mod_base = OTHER; note = cytidine-3'-phosphate
  modified_base 18: mod_base = OTHER; note = guanosine-3'-phosphate
  modified_base 19: mod_base = OTHER; note = guanosine-3'-phosphate
  misc_feature 1..19: note = RNA
  misc_feature 20..21: note = DNA
cagtgtatccaccacgcggtt

SEQ ID NO: 649 - DNA, 21 bp, synthetic construct
  source 1..21: mol_type = other DNA
  modified_base 1: mod_base = OTHER; note = uridine-3'-phosphate
  modified_base 2: mod_base = OTHER; note = cytidine-3'-phosphate
  modified_base 3: mod_base = OTHER; note = uridine-3'-phosphate
  modified_base 4: mod_base = OTHER; note = cytidine-3'-phosphate
  modified_base 5: mod_base = OTHER; note = cytidine-3'-phosphate
  modified_base 6: mod_base = OTHER; note = adenosine-3'-phosphate
  modified_base 7: mod_base = OTHER; note = guanosine-3'-phosphate
  modified_base 8: mod_base = OTHER; note = cytidine-3'-phosphate
  modified_base 9: mod_base = OTHER; note = uridine-3'-phosphate
  modified_base 10: mod_base = OTHER; note = cytidine-3'-phosphate
  modified_base 11: mod_base = OTHER; note = cytidine-3'-phosphate
  modified_base 12: mod_base = OTHER; note = cytidine-3'-phosphate
  modified_base 13: mod_base = OTHER; note = adenosine-3'-phosphate
  modified_base 14: mod_base = OTHER; note = guanosine-3'-phosphate
  modified_base 15: mod_base = OTHER; note = uridine-3'-phosphate
  modified_base 16: mod_base = OTHER; note = guanosine-3'-phosphate
  modified_base 17: mod_base = OTHER; note = uridine-3'-phosphate
  modified_base 18: mod_base = OTHER; note = adenosine-3'-phosphate
  modified_base 19: mod_base = OTHER; note = uridine-3'-phosphate
  misc_feature 1..19: note = RNA
  misc_feature 20..21: note = DNA
tctccagctcccagtgtattt

SEQ ID NO: 650 - DNA, 21 bp, synthetic construct
  source 1..21: mol_type = other DNA
  modified_base 1: mod_base = OTHER; note = adenosine-3'-phosphate
  modified_base 2: mod_base = OTHER; note = uridine-3'-phosphate
  modified_base 3: mod_base = OTHER; note = uridine-3'-phosphate
  modified_base 4: mod_base = OTHER; note = guanosine-3'-phosphate
  modified_base 5: mod_base = OTHER; note = adenosine-3'-phosphate
  modified_base 6: mod_base = OTHER; note = adenosine-3'-phosphate
  modified_base 7: mod_base = OTHER; note = guanosine-3'-phosphate
  modified_base 8: mod_base = OTHER; note = guanosine-3'-phosphate
  modified_base 9: mod_base = OTHER; note = uridine-3'-phosphate
  modified_base 10: mod_base = OTHER; note = guanosine-3'-phosphate
  modified_base 11: mod_base = OTHER; note = uridine-3'-phosphate
  modified_base 12: mod_base = OTHER; note = cytidine-3'-phosphate
  modified_base 13: mod_base = OTHER; note = uridine-3'-phosphate
  modified_base 14: mod_base = OTHER; note = cytidine-3'-phosphate
  modified_base 15: mod_base = OTHER; note = cytidine-3'-phosphate
  modified_base 16: mod_base = OTHER; note = adenosine-3'-phosphate
  modified_base 17: mod_base = OTHER; note = guanosine-3'-phosphate
  modified_base 18: mod_base = OTHER; note = cytidine-3'-phosphate
  modified_base 19: mod_base = OTHER; note = uridine-3'-phosphate
  misc_feature 1..19: note = RNA
  misc_feature 20..21: note = DNA
attgaaggtgtctccagcttt

SEQ ID NO: 651 - DNA, 21 bp, synthetic construct
  source 1..21: mol_type = other DNA
  modified_base 1: mod_base = OTHER; note = uridine-3'-phosphate
  modified_base 2: mod_base = OTHER; note = guanosine-3'-phosphate
  modified_base 3: mod_base = OTHER; note = adenosine-3'-phosphate
  modified_base 4: mod_base = OTHER; note = cytidine-3'-phosphate
  modified_base 5: mod_base = OTHER; note = guanosine-3'-phosphate
  modified_base 6: mod_base = OTHER; note = guanosine-3'-phosphate
  modified_base 7: mod_base = OTHER; note = adenosine-3'-phosphate
  modified_base 8: mod_base = OTHER; note = guanosine-3'-phosphate
  modified_base 9: mod_base = OTHER; note = guanosine-3'-phosphate
  modified_base 10: mod_base = OTHER; note = cytidine-3'-phosphate
  modified_base 11: mod_base = OTHER; note = adenosine-3'-phosphate
  modified_base 12: mod_base = OTHER; note = uridine-3'-phosphate
  modified_base 13: mod_base = OTHER; note = uridine-3'-phosphate
  modified_base 14: mod_base = OTHER; note = guanosine-3'-phosphate
  modified_base 15: mod_base = OTHER; note = adenosine-3'-phosphate
  modified_base 16: mod_base = OTHER; note = adenosine-3'-phosphate
  modified_base 17: mod_base = OTHER; note = guanosine-3'-phosphate
  modified_base 18: mod_base = OTHER; note = guanosine-3'-phosphate
  modified_base 19: mod_base = OTHER; note = uridine-3'-phosphate
  misc_feature 1..19: note = RNA
  misc_feature 20..21: note = DNA
tgacggaggcattgaaggttt

SEQ ID NO: 652 - DNA, 21 bp, synthetic construct
  source 1..21: mol_type = other DNA
  modified_base 1: mod_base = OTHER; note = adenosine-3'-phosphate
  modified_base 2: mod_base = OTHER; note = guanosine-3'-phosphate
  modified_base 3: mod_base = OTHER; note = adenosine-3'-phosphate
  modified_base 4: mod_base = OTHER; note = guanosine-3'-phosphate
  modified_base 5: mod_base = OTHER; note = guanosine-3'-phosphate
  modified_base 6: mod_base = OTHER; note = cytidine-3'-phosphate
  modified_base 7: mod_base = OTHER; note = uridine-3'-phosphate
  modified_base 8: mod_base = OTHER; note = guanosine-3'-phosphate
  modified_base 9: mod_base = OTHER; note = adenosine-3'-phosphate
  modified_base 10: mod_base = OTHER; note = adenosine-3'-phosphate
  modified_base 11: mod_base = OTHER; note = guanosine-3'-phosphate
  modified_base 12: mod_base = OTHER; note = adenosine-3'-phosphate
  modified_base 13: mod_base = OTHER; note = uridine-3'-phosphate
  modified_base 14: mod_base = OTHER; note = guanosine-3'-phosphate
  modified_base 15: mod_base = OTHER; note = adenosine-3'-phosphate
  modified_base 16: mod_base = OTHER; note = cytidine-3'-phosphate
  modified_base 17: mod_base = OTHER; note = guanosine-3'-phosphate
  modified_base 18: mod_base = OTHER; note = guanosine-3'-phosphate
  modified_base 19: mod_base = OTHER; note = adenosine-3'-phosphate
  misc_feature 1..19: note = RNA
  misc_feature 20..21: note = DNA
agaggctgaagatgacggatt

SEQ ID NO: 653 - DNA, 21 bp, synthetic construct
  source 1..21: mol_type = other DNA
  modified_base 1: mod_base = OTHER; note = uridine-3'-phosphate
  modified_base 2: mod_base = OTHER; note = cytidine-3'-phosphate
  modified_base 3: mod_base = OTHER; note = cytidine-3'-phosphate
  modified_base 4: mod_base = OTHER; note = uridine-3'-phosphate
  modified_base 5: mod_base = OTHER; note = cytidine-3'-phosphate
  modified_base 6: mod_base = OTHER; note = cytidine-3'-phosphate
  modified_base 7: mod_base = OTHER; note = cytidine-3'-phosphate
  modified_base 8: mod_base = OTHER; note = cytidine-3'-phosphate
  modified_base 9: mod_base = OTHER; note = uridine-3'-phosphate
  modified_base 10: mod_base = OTHER; note = guanosine-3'-phosphate
  modified_base 11: mod_base = OTHER; note = guanosine-3'-phosphate
  modified_base 12: mod_base = OTHER; note = guanosine-3'-phosphate
  modified_base 13: mod_base = OTHER; note = adenosine-3'-phosphate
  modified_base 14: mod_base = OTHER; note = guanosine-3'-phosphate
  modified_base 15: mod_base = OTHER; note = adenosine-3'-phosphate
  modified_base 16: mod_base = OTHER; note = guanosine-3'-phosphate
  modified_base 17: mod_base = OTHER; note = guanosine-3'-phosphate
  modified_base 18: mod_base = OTHER; note = cytidine-3'-phosphate
  modified_base 19: mod_base = OTHER; note = uridine-3'-phosphate
  misc_feature 1..19: note = RNA
  misc_feature 20..21: note = DNA
tcctcccctgggagaggcttt

SEQ ID NO: 654 - DNA, 21 bp, synthetic construct
  source 1..21: mol_type = other DNA
  modified_base 1: mod_base = OTHER; note = adenosine-3'-phosphate
  modified_base 2: mod_base = OTHER; note = adenosine-3'-phosphate
  modified_base 3: mod_base = OTHER; note = uridine-3'-phosphate
  modified_base 4: mod_base = OTHER; note = cytidine-3'-phosphate
  modified_base 5: mod_base = OTHER; note = uridine-3'-phosphate
  modified_base 6: mod_base = OTHER; note = cytidine-3'-phosphate
  modified_base 7: mod_base = OTHER; note = adenosine-3'-phosphate
  modified_base 8: mod_base = OTHER; note = guanosine-3'-phosphate
  modified_base 9: mod_base = OTHER; note = uridine-3'-phosphate
  modified_base 10: mod_base = OTHER; note = guanosine-3'-phosphate
  modified_base 11: mod_base = OTHER; note = cytidine-3'-phosphate
  modified_base 12: mod_base = OTHER; note = uridine-3'-phosphate
  modified_base 13: mod_base = OTHER; note = uridine-3'-phosphate
  modified_base 14: mod_base = OTHER; note = cytidine-3'-phosphate
  modified_base 15: mod_base = OTHER; note = cytidine-3'-phosphate
  modified_base 16: mod_base = OTHER; note = uridine-3'-phosphate
  modified_base 17: mod_base = OTHER; note = guanosine-3'-phosphate
  modified_base 18: mod_base = OTHER; note = cytidine-3'-phosphate
  modified_base 19: mod_base = OTHER; note = adenosine-3'-phosphate
  misc_feature 1..19: note = RNA
  misc_feature 20..21: note = DNA
aatctcagtgcttcctgcatt

SEQ ID NO: 655 - DNA, 21 bp, synthetic construct
  source 1..21: mol_type = other DNA
  modified_base 1: mod_base = OTHER; note = cytidine-3'-phosphate
  modified_base 2: mod_base = OTHER; note = cytidine-3'-phosphate
  modified_base 3: mod_base = OTHER; note = uridine-3'-phosphate
  modified_base 4: mod_base = OTHER; note = guanosine-3'-phosphate
  modified_base 5: mod_base = OTHER; note = guanosine-3'-phosphate
  modified_base 6: mod_base = OTHER; note = cytidine-3'-phosphate
  modified_base 7: mod_base = OTHER; note = adenosine-3'-phosphate
  modified_base 8: mod_base = OTHER; note = cytidine-3'-phosphate
  modified_base 9: mod_base = OTHER; note = cytidine-3'-phosphate
  modified_base 10: mod_base = OTHER; note = cytidine-3'-phosphate
  modified_base 11: mod_base = OTHER; note = guanosine-3'-phosphate
  modified_base 12: mod_base = OTHER; note = adenosine-3'-phosphate
  modified_base 13: mod_base = OTHER; note = adenosine-3'-phosphate
  modified_base 14: mod_base = OTHER; note = uridine-3'-phosphate
  modified_base 15: mod_base = OTHER; note = cytidine-3'-phosphate
  modified_base 16: mod_base = OTHER; note = uridine-3'-phosphate
  modified_base 17: mod_base = OTHER; note = cytidine-3'-phosphate
  modified_base 18: mod_base = OTHER; note = adenosine-3'-phosphate
  modified_base 19: mod_base = OTHER; note = guanosine-3'-phosphate
  misc_feature 1..19: note = RNA
  misc_feature 20..21: note = DNA
cctggcacccgaatctcagtt

SEQ ID NO: 656 - DNA, 21 bp, synthetic construct
  source 1..21: mol_type = other DNA
  modified_base 1: mod_base = OTHER; note = uridine-3'-phosphate
  modified_base 2: mod_base = OTHER; note = uridine-3'-phosphate
  modified_base 3: mod_base = OTHER; note = guanosine-3'-phosphate
  modified_base 4: mod_base = OTHER; note = cytidine-3'-phosphate
  modified_base 5: mod_base = OTHER; note = cytidine-3'-phosphate
  modified_base 6: mod_base = OTHER; note = guanosine-3'-phosphate
  modified_base 7: mod_base = OTHER; note = guanosine-3'-phosphate
  modified_base 8: mod_base = OTHER; note = cytidine-3'-phosphate
  modified_base 9: mod_base = OTHER; note = cytidine-3'-phosphate
  modified_base 10: mod_base = OTHER; note = adenosine-3'-phosphate
  modified_base 11: mod_base = OTHER; note = cytidine-3'-phosphate
  modified_base 12: mod_base = OTHER; note = cytidine-3'-phosphate
  modified_base 13: mod_base = OTHER; note = uridine-3'-phosphate
  modified_base 14: mod_base = OTHER; note = guanosine-3'-phosphate
  modified_base 15: mod_base = OTHER; note = guanosine-3'-phosphate
  modified_base 16: mod_base = OTHER; note = cytidine-3'-phosphate
  modified_base 17: mod_base = OTHER; note = adenosine-3'-phosphate
  modified_base 18: mod_base = OTHER; note = cytidine-3'-phosphate
  modified_base 19: mod_base = OTHER; note = cytidine-3'-phosphate
  misc_feature 1..19: note = RNA
  misc_feature 20..21: note = DNA
ttgccggccacctggcacctt

SEQ ID NO: 657 - DNA, 21 bp, synthetic construct
  source 1..21: mol_type = other DNA
  modified_base 1: mod_base = OTHER; note = adenosine-3'-phosphate
  modified_base 2: mod_base = OTHER; note = adenosine-3'-phosphate
  modified_base 3: mod_base = OTHER; note = guanosine-3'-phosphate
  modified_base 4: mod_base = OTHER; note = cytidine-3'-phosphate
  modified_base 5: mod_base = OTHER; note = cytidine-3'-phosphate
  modified_base 6: mod_base = OTHER; note = cytidine-3'-phosphate
  modified_base 7: mod_base = OTHER; note = uridine-3'-phosphate
  modified_base 8: mod_base = OTHER; note = guanosine-3'-phosphate
  modified_base 9: mod_base = OTHER; note = cytidine-3'-phosphate
  modified_base 10: mod_base = OTHER; note = adenosine-3'-phosphate
  modified_base 11: mod_base = OTHER; note = guanosine-3'-phosphate
  modified_base 12: mod_base = OTHER; note = guanosine-3'-phosphate
  modified_base 13: mod_base = OTHER; note = cytidine-3'-phosphate
  modified_base 14: mod_base = OTHER; note = cytidine-3'-phosphate
  modified_base 15: mod_base = OTHER; note = adenosine-3'-phosphate
  modified_base 16: mod_base = OTHER; note = cytidine-3'-phosphate
  modified_base 17: mod_base = OTHER; note = adenosine-3'-phosphate
  modified_base 18: mod_base = OTHER; note = cytidine-3'-phosphate
  modified_base 19: mod_base = OTHER; note = uridine-3'-phosphate
  misc_feature 1..19: note = RNA
  misc_feature 20..21: note = DNA
aagccctgcaggccacacttt

SEQ ID NO: 658 - DNA, 21 bp, synthetic construct
  source 1..21: mol_type = other DNA
  modified_base 1: mod_base = OTHER; note = cytidine-3'-phosphate
  modified_base 2: mod_base = OTHER; note = guanosine-3'-phosphate
  modified_base 3: mod_base = OTHER; note = adenosine-3'-phosphate
  modified_base 4: mod_base = OTHER; note = uridine-3'-phosphate
  modified_base 5: mod_base = OTHER; note = guanosine-3'-phosphate
  modified_base 6: mod_base = OTHER; note = cytidine-3'-phosphate
  modified_base 7: mod_base = OTHER; note = cytidine-3'-phosphate
  modified_base 8: mod_base = OTHER; note = adenosine-3'-phosphate
  modified_base 9: mod_base = OTHER; note = uridine-3'-phosphate
  modified_base 10: mod_base = OTHER; note = cytidine-3'-phosphate
  modified_base 11: mod_base = OTHER; note = adenosine-3'-phosphate
  modified_base 12: mod_base = OTHER; note = adenosine-3'-phosphate
  modified_base 13: mod_base = OTHER; note = adenosine-3'-phosphate
  modified_base 14: mod_base = OTHER; note = guanosine-3'-phosphate
  modified_base 15: mod_base = OTHER; note = cytidine-3'-phosphate
  modified_base 16: mod_base = OTHER; note = cytidine-3'-phosphate
  modified_base 17: mod_base = OTHER; note = cytidine-3'-phosphate
  modified_base 18: mod_base = OTHER; note = uridine-3'-phosphate
  modified_base 19: mod_base = OTHER; note = guanosine-3'-phosphate
  misc_feature 1..19: note = RNA
  misc_feature 20..21: note = DNA
cgatgccatcaaagccctgtt

SEQ ID NO: 659 - DNA, 21 bp, synthetic construct
  source 1..21: mol_type = other DNA
  modified_base 1: mod_base = OTHER; note = adenosine-3'-phosphate
  modified_base 2: mod_base = OTHER; note = cytidine-3'-phosphate
  modified_base 3: mod_base = OTHER; note = cytidine-3'-phosphate
  modified_base 4: mod_base = OTHER; note = uridine-3'-phosphate
  modified_base 5: mod_base = OTHER; note = guanosine-3'-phosphate
  modified_base 6: mod_base = OTHER; note = cytidine-3'-phosphate
  modified_base 7: mod_base = OTHER; note = uridine-3'-phosphate
  modified_base 8: mod_base = OTHER; note = cytidine-3'-phosphate
  modified_base 9: mod_base = OTHER; note = uridine-3'-phosphate
  modified_base 10: mod_base = OTHER; note = cytidine-3'-phosphate
  modified_base 11: mod_base = OTHER; note = adenosine-3'-phosphate
  modified_base 12: mod_base = OTHER; note = cytidine-3'-phosphate
  modified_base 13: mod_base = OTHER; note = adenosine-3'-phosphate
  modified_base 14: mod_base = OTHER; note = cytidine-3'-phosphate
  modified_base 15: mod_base = OTHER; note = guanosine-3'-phosphate
  modified_base 16: mod_base = OTHER; note = adenosine-3'-phosphate
  modified_base 17: mod_base = OTHER; note = uridine-3'-phosphate
  modified_base 18: mod_base = OTHER; note = guanosine-3'-phosphate
  modified_base 19: mod_base = OTHER; note = cytidine-3'-phosphate
  misc_feature 1..19: note = RNA
  misc_feature 20..21: note = DNA
acctgctctcacacgatgctt

SEQ ID NO: 660 - DNA, 21 bp, synthetic construct
  source 1..21: mol_type = other DNA
  modified_base 1: mod_base = OTHER; note = adenosine-3'-phosphate
  modified_base 2: mod_base = OTHER; note = guanosine-3'-phosphate
  modified_base 3: mod_base = OTHER; note = guanosine-3'-phosphate
  modified_base 4: mod_base = OTHER; note = adenosine-3'-phosphate
  modified_base 5: mod_base = OTHER; note = guanosine-3'-phosphate
  modified_base 6: mod_base = OTHER; note = cytidine-3'-phosphate
  modified_base 7: mod_base = OTHER; note = cytidine-3'-phosphate
  modified_base 8: mod_base = OTHER; note = guanosine-3'-phosphate
  modified_base 9: mod_base = OTHER; note = guanosine-3'-phosphate
  modified_base 10: mod_base = OTHER; note = cytidine-3'-phosphate
  modified_base 11: mod_base = OTHER; note = adenosine-3'-phosphate
  modified_base 12: mod_base = OTHER; note = cytidine-3'-phosphate
  modified_base 13: mod_base = OTHER; note = cytidine-3'-phosphate
  modified_base 14: mod_base = OTHER; note = uridine-3'-phosphate
  modified_base 15: mod_base = OTHER; note = guanosine-3'-phosphate
  modified_base 16: mod_base = OTHER; note = cytidine-3'-phosphate
  modified_base 17: mod_base = OTHER; note = uridine-3'-phosphate
  modified_base 18: mod_base = OTHER; note = cytidine-3'-phosphate
  modified_base 19: mod_base = OTHER; note = uridine-3'-phosphate
  misc_feature 1..19: note = RNA
  misc_feature 20..21: note = DNA
aggagccggcacctgctcttt

SEQ ID NO: 661 - DNA, 21 bp, synthetic construct
  source 1..21: mol_type = other DNA
  modified_base 1: mod_base = OTHER; note = adenosine-3'-phosphate
  modified_base 2: mod_base = OTHER; note = uridine-3'-phosphate
  modified_base 3: mod_base = OTHER; note = guanosine-3'-phosphate
  modified_base 4: mod_base = OTHER; note = guanosine-3'-phosphate
  modified_base 5: mod_base = OTHER; note = uridine-3'-phosphate
  modified_base 6: mod_base = OTHER; note = guanosine-3'-phosphate
  modified_base 7: mod_base = OTHER; note = uridine-3'-phosphate
  modified_base 8: mod_base = OTHER; note = guanosine-3'-phosphate
  modified_base 9: mod_base = OTHER; note = uridine-3'-phosphate
  modified_base 10: mod_base = OTHER; note = guanosine-3'-phosphate
  modified_base 11: mod_base = OTHER; note = adenosine-3'-phosphate
  modified_base 12: mod_base = OTHER; note = guanosine-3'-phosphate
  modified_base 13: mod_base = OTHER; note = guanosine-3'-phosphate
  modified_base 14: mod_base = OTHER; note = adenosine-3'-phosphate
  modified_base 15: mod_base = OTHER; note = guanosine-3'-phosphate
  modified_base 16: mod_base = OTHER; note = cytidine-3'-phosphate
  modified_base 17: mod_base = OTHER; note = cytidine-3'-phosphate
  modified_base 18: mod_base = OTHER; note = guanosine-3'-phosphate
  modified_base 19: mod_base = OTHER; note = guanosine-3'-phosphate
  misc_feature 1..19: note = RNA
  misc_feature 20..21: note = DNA
atggtgtgtgaggagccggtt

SEQ ID NO: 662 - DNA, 21 bp, synthetic construct
  source 1..21: mol_type = other DNA
  modified_base 1: mod_base = OTHER; note = uridine-3'-phosphate
  modified_base 2: mod_base = OTHER; note = guanosine-3'-phosphate
  modified_base 3: mod_base = OTHER; note = guanosine-3'-phosphate
  modified_base 4: mod_base = OTHER; note = uridine-3'-phosphate
  modified_base 5: mod_base = OTHER; note = adenosine-3'-phosphate
  modified_base 6: mod_base = OTHER; note = guanosine-3'-phosphate
  modified_base 7: mod_base = OTHER; note = uridine-3'-phosphate
  modified_base 8: mod_base = OTHER; note = cytidine-3'-phosphate
  modified_base 9: mod_base = OTHER; note = uridine-3'-phosphate
  modified_base 10: mod_base = OTHER; note = cytidine-3'-phosphate
  modified_base 11: mod_base = OTHER; note = cytidine-3'-phosphate
  modified_base 12: mod_base = OTHER; note = adenosine-3'-phosphate
  modified_base 13: mod_base = OTHER; note = uridine-3'-phosphate
  modified_base 14: mod_base = OTHER; note = guanosine-3'-phosphate
  modified_base 15: mod_base = OTHER; note = guanosine-3'-phosphate
  modified_base 16: mod_base = OTHER; note = uridine-3'-phosphate
  modified_base 17: mod_base = OTHER; note = guanosine-3'-phosphate
  modified_base 18: mod_base = OTHER; note = uridine-3'-phosphate
  modified_base 19: mod_base = OTHER; note = guanosine-3'-phosphate
  misc_feature 1..19: note = RNA
  misc_feature 20..21: note = DNA
tggtagtctccatggtgtgtt

SEQ ID NO: 663 - DNA, 21 bp, synthetic construct
  source 1..21: mol_type = other DNA
  modified_base 1: mod_base = OTHER; note = adenosine-3'-phosphate
  modified_base 2: mod_base = OTHER; note = uridine-3'-phosphate
  modified_base 3: mod_base = OTHER; note = guanosine-3'-phosphate
  modified_base 4: mod_base = OTHER; note = cytidine-3'-phosphate
  modified_base 5: mod_base = OTHER; note = adenosine-3'-phosphate
  modified_base 6: mod_base = OTHER; note = guanosine-3'-phosphate
  modified_base 7: mod_base = OTHER; note = cytidine-3'-phosphate
  modified_base 8: mod_base = OTHER; note = cytidine-3'-phosphate
  modified_base 9: mod_base = OTHER; note = guanosine-3'-phosphate
  modified_base 10: mod_base = OTHER; note = cytidine-3'-phosphate
  modified_base 11: mod_base = OTHER; note = adenosine-3'-phosphate
  modified_base 12: mod_base = OTHER; note = adenosine-3'-phosphate
  modified_base 13: mod_base = OTHER; note = uridine-3'-phosphate
  modified_base 14: mod_base = OTHER; note = guanosine-3'-phosphate
  modified_base 15: mod_base = OTHER; note = guanosine-3'-phosphate
  modified_base 16: mod_base = OTHER; note = uridine-3'-phosphate
  modified_base 17: mod_base = OTHER; note = adenosine-3'-phosphate
  modified_base 18: mod_base = OTHER; note = guanosine-3'-phosphate
  modified_base 19: mod_base = OTHER; note = uridine-3'-phosphate
  misc_feature 1..19: note = RNA
  misc_feature 20..21: note = DNA
atgcagccgcaatggtagttt

SEQ ID NO: 664 - DNA, 21 bp, synthetic construct
  source 1..21: mol_type = other DNA
  modified_base 1: mod_base = OTHER; note = guanosine-3'-phosphate
  modified_base 2: mod_base = OTHER; note = guanosine-3'-phosphate
  modified_base 3: mod_base = OTHER; note = adenosine-3'-phosphate
  modified_base 4: mod_base = OTHER; note = guanosine-3'-phosphate
  modified_base 5: mod_base = OTHER; note = adenosine-3'-phosphate
  modified_base 6: mod_base = OTHER; note = adenosine-3'-phosphate
  modified_base 7: mod_base = OTHER; note = guanosine-3'-phosphate
  modified_base 8: mod_base = OTHER; note = guanosine-3'-phosphate
  modified_base 9: mod_base = OTHER; note = cytidine-3'-phosphate
  modified_base 10: mod_base = OTHER; note = guanosine-3'-phosphate
  modified_base 11: mod_base = OTHER; note = adenosine-3'-phosphate
  modified_base 12: mod_base = OTHER; note = uridine-3'-phosphate
  modified_base 13: mod_base = OTHER; note = guanosine-3'-phosphate
  modified_base 14: mod_base = OTHER; note = cytidine-3'-phosphate
  modified_base 15: mod_base = OTHER; note = adenosine-3'-phosphate
  modified_base 16: mod_base = OTHER; note = guanosine-3'-phosphate
  modified_base 17: mod_base = OTHER; note = cytidine-3'-phosphate
  modified_base 18: mod_base = OTHER; note = cytidine-3'-phosphate
  modified_base 19: mod_base = OTHER; note = guanosine-3'-phosphate
  misc_feature 1..19: note = RNA
  misc_feature 20..21: note = DNA
ggagaaggcgatgcagccgtt

SEQ ID NO: 665 - DNA, 21 bp, synthetic construct
  source 1..21: mol_type = other DNA
  modified_base 1: mod_base = OTHER; note = guanosine-3'-phosphate
  modified_base 2: mod_base = OTHER; note = guanosine-3'-phosphate
  modified_base 3: mod_base = OTHER; note = cytidine-3'-phosphate
  modified_base 4: mod_base = OTHER; note = uridine-3'-phosphate
  modified_base 5: mod_base = OTHER; note = guanosine-3'-phosphate
  modified_base 6: mod_base = OTHER; note = guanosine-3'-phosphate
  modified_base 7: mod_base = OTHER; note = adenosine-3'-phosphate
  modified_base 8: mod_base = OTHER; note = uridine-3'-phosphate
  modified_base 9: mod_base = OTHER; note = guanosine-3'-phosphate
  modified_base 10: mod_base = OTHER; note = guanosine-3'-phosphate
  modified_base 11: mod_base = OTHER; note = adenosine-3'-phosphate
  modified_base 12: mod_base = OTHER; note = guanosine-3'-phosphate
  modified_base 13: mod_base = OTHER; note = guanosine-3'-phosphate
  modified_base 14: mod_base = OTHER; note = guanosine-3'-phosphate
  modified_base 15: mod_base = OTHER; note = guanosine-3'-phosphate
  modified_base 16: mod_base = OTHER; note = adenosine-3'-phosphate
  modified_base 17: mod_base = OTHER; note = guanosine-3'-phosphate
  modified_base 18: mod_base = OTHER; note = adenosine-3'-phosphate
  modified_base 19: mod_base = OTHER; note = adenosine-3'-phosphate
  misc_feature 1..19: note = RNA
  misc_feature 20..21: note = DNA
ggctggatggaggggagaatt

SEQ ID NO: 666 - DNA, 21 bp, synthetic construct
  source 1..21: mol_type = other DNA
  modified_base 1: mod_base = OTHER; note = cytidine-3'-phosphate
  modified_base 2: mod_base = OTHER; note = cytidine-3'-phosphate
  modified_base 3: mod_base = OTHER; note = uridine-3'-phosphate
  modified_base 4: mod_base = OTHER; note = guanosine-3'-phosphate
  modified_base 5: mod_base = OTHER; note = guanosine-3'-phosphate
  modified_base 6: mod_base = OTHER; note = adenosine-3'-phosphate
  modified_base 7: mod_base = OTHER; note = cytidine-3'-phosphate
  modified_base 8: mod_base = OTHER; note = guanosine-3'-phosphate
  modified_base 9: mod_base = OTHER; note = cytidine-3'-phosphate
  modified_base 10: mod_base = OTHER; note = cytidine-3'-phosphate
  modified_base 11: mod_base = OTHER; note = adenosine-3'-phosphate
  modified_base 12: mod_base = OTHER; note = guanosine-3'-phosphate
  modified_base 13: mod_base = OTHER; note = guanosine-3'-phosphate
  modified_base 14: mod_base = OTHER; note = cytidine-3'-phosphate
  modified_base 15: mod_base = OTHER; note = uridine-3'-phosphate
  modified_base 16: mod_base = OTHER; note = guanosine-3'-phosphate
  modified_base 17: mod_base = OTHER; note = guanosine-3'-phosphate
  modified_base 18: mod_base = OTHER; note = adenosine-3'-phosphate
  modified_base 19: mod_base = OTHER; note = uridine-3'-phosphate
  misc_feature 1..19: note = RNA
  misc_feature 20..21: note = DNA
cctggacgccaggctggattt

SEQ ID NO: 667 - DNA, 21 bp, synthetic construct
  source 1..21: mol_type = other DNA
  modified_base 1: mod_base = OTHER; note = adenosine-3'-phosphate
  modified_base 2: mod_base = OTHER; note = cytidine-3'-phosphate
  modified_base 3: mod_base = OTHER; note = adenosine-3'-phosphate
  modified_base 4: mod_base = OTHER; note = guanosine-3'-phosphate
  modified_base 5: mod_base = OTHER; note = guanosine-3'-phosphate
  modified_base 6: mod_base = OTHER; note = guanosine-3'-phosphate
  modified_base 7: mod_base = OTHER; note = cytidine-3'-phosphate
  modified_base 8: mod_base = OTHER; note = adenosine-3'-phosphate
  modified_base 9: mod_base = OTHER; note = adenosine-3'-phosphate
  modified_base 10: mod_base = OTHER; note = cytidine-3'-phosphate
  modified_base 11: mod_base = OTHER; note = cytidine-3'-phosphate
  modified_base 12: mod_base = OTHER; note = uridine-3'-phosphate
  modified_base 13: mod_base = OTHER; note = guanosine-3'-phosphate
  modified_base 14: mod_base = OTHER; note = guanosine-3'-phosphate
  modified_base 15: mod_base = OTHER; note = adenosine-3'-phosphate
  modified_base 16: mod_base = OTHER; note = cytidine-3'-phosphate
  modified_base 17: mod_base = OTHER; note = guanosine-3'-phosphate
  modified_base 18: mod_base = OTHER; note = cytidine-3'-phosphate
  modified_base 19: mod_base = OTHER; note = cytidine-3'-phosphate
  misc_feature 1..19: note = RNA
  misc_feature 20..21: note = DNA
acagggcaacctggacgcctt

SEQ ID NO: 668 - DNA, 21 bp, synthetic construct
  source 1..21: mol_type = other DNA
  modified_base 1: mod_base = OTHER; note = adenosine-3'-phosphate
  modified_base 2: mod_base = OTHER; note = uridine-3'-phosphate
  modified_base 3: mod_base = OTHER; note = cytidine-3'-phosphate
  modified_base 4: mod_base = OTHER; note = uridine-3'-phosphate
  modified_base 5: mod_base = OTHER; note = guanosine-3'-phosphate
  modified_base 6: mod_base = OTHER; note = uridine-3'-phosphate
  modified_base 7: mod_base = OTHER; note = cytidine-3'-phosphate
  modified_base 8: mod_base = OTHER; note = cytidine-3'-phosphate
  modified_base 9: mod_base = OTHER; note = cytidine-3'-phosphate
  modified_base 10: mod_base = OTHER; note = cytidine-3'-phosphate
  modified_base 11: mod_base = OTHER; note = uridine-3'-phosphate
  modified_base 12: mod_base = OTHER; note = guanosine-3'-phosphate
  modified_base 13: mod_base = OTHER; note = adenosine-3'-phosphate
  modified_base 14: mod_base = OTHER; note = adenosine-3'-phosphate
  modified_base 15: mod_base = OTHER; note = cytidine-3'-phosphate
  modified_base 16: mod_base = OTHER; note = adenosine-3'-phosphate
  modified_base 17: mod_base = OTHER; note = guanosine-3'-phosphate
  modified_base 18: mod_base = OTHER; note = guanosine-3'-phosphate
  modified_base 19: mod_base = OTHER; note = guanosine-3'-phosphate
  misc_feature 1..19: note = RNA
  misc_feature 20..21: note = DNA
atctgtcccctgaacagggtt

SEQ ID NO: 669 - DNA, 21 bp, synthetic construct
  source 1..21: mol_type = other DNA
  modified_base 1: mod_base = OTHER; note = adenosine-3'-phosphate
  modified_base 2: mod_base = OTHER; note = cytidine-3'-phosphate
  modified_base 3: mod_base = OTHER; note = adenosine-3'-phosphate
  modified_base 4: mod_base = OTHER; note = guanosine-3'-phosphate
  modified_base 5: mod_base = OTHER; note = cytidine-3'-phosphate
  modified_base 6: mod_base = OTHER; note = uridine-3'-phosphate
  modified_base 7: mod_base = OTHER; note = uridine-3'-phosphate
  modified_base 8: mod_base = OTHER; note = guanosine-3'-phosphate
  modified_base 9: mod_base = OTHER; note = cytidine-3'-phosphate
  modified_base 10: mod_base = OTHER; note = adenosine-3'-phosphate
  modified_base 11: mod_base = OTHER; note = uridine-3'-phosphate
  modified_base 12: mod_base = OTHER; note = cytidine-3'-phosphate
  modified_base 13: mod_base = OTHER; note = uridine-3'-phosphate
  modified_base 14: mod_base = OTHER; note = guanosine-3'-phosphate
  modified_base 15: mod_base = OTHER; note = uridine-3'-phosphate
  modified_base 16: mod_base = OTHER; note = cytidine-3'-phosphate
  modified_base 17: mod_base = OTHER; note = cytidine-3'-phosphate
  modified_base 18: mod_base = OTHER; note = cytidine-3'-phosphate
  modified_base 19: mod_base = OTHER; note = cytidine-3'-phosphate
  misc_feature 1..19: note = RNA
  misc_feature 20..21: note = DNA
acagcttgcatctgtcccctt

SEQ ID NO: 670 - DNA, 21 bp, synthetic construct
  source 1..21: mol_type = other DNA
  modified_base 1: mod_base = OTHER; note = guanosine-3'-phosphate
  modified_base 2: mod_base = OTHER; note = adenosine-3'-phosphate
  modified_base 3: mod_base = OTHER; note = guanosine-3'-phosphate
  modified_base 4: mod_base = OTHER; note = uridine-3'-phosphate
  modified_base 5: mod_base = OTHER; note = cytidine-3'-phosphate
  modified_base 6: mod_base = OTHER; note = cytidine-3'-phosphate
  modified_base 7: mod_base = OTHER; note = uridine-3'-phosphate
  modified_base 8: mod_base = OTHER; note = cytidine-3'-phosphate
  modified_base 9: mod_base = OTHER; note = cytidine-3'-phosphate
  modified_base 10: mod_base = OTHER; note = cytidine-3'-phosphate
  modified_base 11: mod_base = OTHER; note = cytidine-3'-phosphate
  modified_base 12: mod_base = OTHER; note = adenosine-3'-phosphate
  modified_base 13: mod_base = OTHER; note = cytidine-3'-phosphate
  modified_base 14: mod_base = OTHER; note = adenosine-3'-phosphate
  modified_base 15: mod_base = OTHER; note = guanosine-3'-phosphate
  modified_base 16: mod_base = OTHER; note = cytidine-3'-phosphate
  modified_base 17: mod_base = OTHER; note = uridine-3'-phosphate
  modified_base 18: mod_base = OTHER; note = uridine-3'-phosphate
  modified_base 19: mod_base = OTHER; note = guanosine-3'-phosphate
  misc_feature 1..19: note = RNA
  misc_feature 20..21: note = DNA
gagtcctccccacagcttgtt

SEQ ID NO: 671 - DNA, 21 bp, synthetic construct
  source 1..21: mol_type = other DNA
  modified_base 1: mod_base = OTHER; note = adenosine-3'-phosphate
  modified_base 2: mod_base = OTHER; note = guanosine-3'-phosphate
  modified_base 3: mod_base = OTHER; note = guanosine-3'-phosphate
  modified_base 4: mod_base = OTHER; note = adenosine-3'-phosphate
  modified_base 5: mod_base = OTHER; note = cytidine-3'-phosphate
  modified_base 6: mod_base = OTHER; note = adenosine-3'-phosphate
  modified_base 7: mod_base = OTHER; note = cytidine-3'-phosphate
  modified_base 8: mod_base = OTHER; note = adenosine-3'-phosphate
  modified_base 9: mod_base = OTHER; note = guanosine-3'-phosphate
  modified_base 10: mod_base = OTHER; note = guanosine-3'-phosphate
  modified_base 11: mod_base = OTHER; note = cytidine-3'-phosphate
  modified_base 12: mod_base = OTHER; note = adenosine-3'-phosphate
  modified_base 13: mod_base = OTHER; note = guanosine-3'-phosphate
  modified_base 14: mod_base = OTHER; note = adenosine-3'-phosphate
  modified_base 15: mod_base = OTHER; note = guanosine-3'-phosphate
  modified_base 16: mod_base = OTHER; note = uridine-3'-phosphate
  modified_base 17: mod_base = OTHER; note = cytidine-3'-phosphate
  modified_base 18: mod_base = OTHER; note = cytidine-3'-phosphate
  modified_base 19: mod_base = OTHER; note = uridine-3'-phosphate
  misc_feature 1..19: note = RNA
  misc_feature 20..21: note = DNA
aggacacaggcagagtccttt

SEQ ID NO: 672 - DNA, 21 bp, synthetic construct
  source 1..21: mol_type = other DNA
  modified_base 1: mod_base = OTHER; note = uridine-3'-phosphate
  modified_base 2: mod_base = OTHER; note = guanosine-3'-phosphate
  modified_base 3: mod_base = OTHER; note = guanosine-3'-phosphate
  modified_base 4: mod_base = OTHER; note = guanosine-3'-phosphate
  modified_base 5: mod_base = OTHER; note = guanosine-3'-phosphate
  modified_base 6: mod_base = OTHER; note = adenosine-3'-phosphate
  modified_base 7: mod_base = OTHER; note = adenosine-3'-phosphate
  modified_base 8: mod_base = OTHER; note = cytidine-3'-phosphate
  modified_base 9: mod_base = OTHER; note = adenosine-3'-phosphate
  modified_base 10: mod_base = OTHER; note = cytidine-3'-phosphate
  modified_base 11: mod_base = OTHER; note = adenosine-3'-phosphate
  modified_base 12: mod_base = OTHER; note = guanosine-3'-phosphate
  modified_base 13: mod_base = OTHER; note = guanosine-3'-phosphate
  modified_base 14: mod_base = OTHER; note = adenosine-3'-phosphate
  modified_base 15: mod_base = OTHER; note = cytidine-3'-phosphate
  modified_base 16: mod_base = OTHER; note = adenosine-3'-phosphate
  modified_base 17: mod_base = OTHER; note = cytidine-3'-phosphate
  modified_base 18: mod_base = OTHER; note = adenosine-3'-phosphate
  modified_base 19: mod_base = OTHER; note = guanosine-3'-phosphate
  misc_feature 1..19: note = RNA
  misc_feature 20..21: note = DNA
tggggaacacaggacacagtt

SEQ ID NO: 673 - DNA, 21 bp, synthetic construct
  source 1..21: mol_type = other DNA
  modified_base 1: mod_base = OTHER; note = adenosine-3'-phosphate
  modified_base 2: mod_base = OTHER; note = guanosine-3'-phosphate
  modified_base 3: mod_base = OTHER; note = cytidine-3'-phosphate
  modified_base 4: mod_base = OTHER; note = cytidine-3'-phosphate
  modified_base 5: mod_base = OTHER; note = uridine-3'-phosphate
  modified_base 6: mod_base = OTHER; note = cytidine-3'-phosphate
  modified_base 7: mod_base = OTHER; note = uridine-3'-phosphate
  modified_base 8: mod_base = OTHER; note = cytidine-3'-phosphate
  modified_base 9: mod_base = OTHER; note = cytidine-3'-phosphate
  modified_base 10: mod_base = OTHER; note = cytidine-3'-phosphate
  modified_base 11: mod_base = OTHER; note = uridine-3'-phosphate
  modified_base 12: mod_base = OTHER; note = guanosine-3'-phosphate
  modified_base 13: mod_base = OTHER; note = uridine-3'-phosphate
  modified_base 14: mod_base = OTHER; note = guanosine-3'-phosphate
  modified_base 15: mod_base = OTHER; note = guanosine-3'-phosphate
  modified_base 16: mod_base = OTHER; note = guanosine-3'-phosphate
  modified_base 17: mod_base = OTHER; note = guanosine-3'-phosphate
  modified_base 18: mod_base = OTHER; note = adenosine-3'-phosphate
  modified_base 19: mod_base = OTHER; note = adenosine-3'-phosphate
  misc_feature 1..19: note = RNA
  misc_feature 20..21: note = DNA
agcctctccctgtggggaatt

SEQ ID NO: 674 - DNA, 21 bp, synthetic construct
  source 1..21: mol_type = other DNA
  modified_base 1: mod_base = OTHER; note = cytidine-3'-phosphate
  modified_base 2: mod_base = OTHER; note = cytidine-3'-phosphate
  modified_base 3: mod_base = OTHER; note = adenosine-3'-phosphate
  modified_base 4: mod_base = OTHER; note = uridine-3'-phosphate
  modified_base 5: mod_base = OTHER; note = cytidine-3'-phosphate
  modified_base 6: mod_base = OTHER; note = cytidine-3'-phosphate
  modified_base 7: mod_base = OTHER; note = cytidine-3'-phosphate
  modified_base 8: mod_base = OTHER; note = cytidine-3'-phosphate
  modified_base 9: mod_base = OTHER; note = cytidine-3'-phosphate
  modified_base 10: mod_base = OTHER; note = cytidine-3'-phosphate
  modified_base 11: mod_base = OTHER; note = adenosine-3'-phosphate
  modified_base 12: mod_base = OTHER; note = guanosine-3'-phosphate
  modified_base 13: mod_base = OTHER; note = adenosine-3'-phosphate
  modified_base 14: mod_base = OTHER; note = guanosine-3'-phosphate
  modified_base 15: mod_base = OTHER; note = cytidine-3'-phosphate
  modified_base 16: mod_base = OTHER; note = cytidine-3'-phosphate
  modified_base 17: mod_base = OTHER; note = uridine-3'-phosphate
  modified_base 18: mod_base = OTHER; note = cytidine-3'-phosphate
  modified_base 19: mod_base = OTHER; note = uridine-3'-phosphate
  misc_feature 1..19: note = RNA
  misc_feature 20..21: note = DNA
ccatccccccagagcctcttt

SEQ ID NO: 675 - DNA, 21 bp, synthetic construct
  source 1..21: mol_type = other DNA
  modified_base 1: mod_base = OTHER; note = adenosine-3'-phosphate
  modified_base 2: mod_base = OTHER; note = uridine-3'-phosphate
  modified_base 3: mod_base = OTHER; note = cytidine-3'-phosphate
  modified_base 4: mod_base = OTHER; note = cytidine-3'-phosphate
  modified_base 5: mod_base = OTHER; note = cytidine-3'-phosphate
  modified_base 6: mod_base = OTHER; note = cytidine-3'-phosphate
  modified_base 7: mod_base = OTHER; note = cytidine-3'-phosphate
  modified_base 8: mod_base = OTHER; note = adenosine-3'-phosphate
  modified_base 9: mod_base = OTHER; note = guanosine-3'-phosphate
  modified_base 10: mod_base = OTHER; note = cytidine-3'-phosphate
  modified_base 11: mod_base = OTHER; note = cytidine-3'-phosphate
  modified_base 12: mod_base = OTHER; note = adenosine-3'-phosphate
  modified_base 13: mod_base = OTHER; note = uridine-3'-phosphate
  modified_base 14: mod_base = OTHER; note = cytidine-3'-phosphate
  modified_base 15: mod_base = OTHER; note = cytidine-3'-phosphate
  modified_base 16: mod_base = OTHER; note = cytidine-3'-phosphate
  modified_base 17: mod_base = OTHER; note = cytidine-3'-phosphate
  modified_base 18: mod_base = OTHER; note = cytidine-3'-phosphate
  modified_base 19: mod_base = OTHER; note = cytidine-3'-phosphate
  misc_feature 1..19: note = RNA
  misc_feature 20..21: note = DNA
atcccccagccatcccccctt

SEQ ID NO: 676 - DNA, 21 bp, synthetic construct
  source 1..21: mol_type = other DNA
  modified_base 1: mod_base = OTHER; note = uridine-3'-phosphate
  modified_base 2: mod_base = OTHER; note = guanosine-3'-phosphate
  modified_base 3: mod_base = OTHER; note = adenosine-3'-phosphate
  modified_base 4: mod_base = OTHER; note = guanosine-3'-phosphate
  modified_base 5: mod_base = OTHER; note = guanosine-3'-phosphate
  modified_base 6: mod_base = OTHER; note = cytidine-3'-phosphate
  modified_base 7: mod_base = OTHER; note = uridine-3'-phosphate
  modified_base 8: mod_base = OTHER; note = cytidine-3'-phosphate
  modified_base 9: mod_base = OTHER; note = uridine-3'-phosphate
  modified_base 10: mod_base = OTHER; note = guanosine-3'-phosphate
  modified_base 11: mod_base = OTHER; note = cytidine-3'-phosphate
  modified_base 12: mod_base = OTHER; note = adenosine-3'-phosphate
  modified_base 13: mod_base = OTHER; note = uridine-3'-phosphate
  modified_base 14: mod_base = OTHER; note = cytidine-3'-phosphate
  modified_base 15: mod_base = OTHER; note = cytidine-3'-phosphate
  modified_base 16: mod_base = OTHER; note = cytidine-3'-phosphate
  modified_base 17: mod_base = OTHER; note = cytidine-3'-phosphate
  modified_base 18: mod_base = OTHER; note = cytidine-3'-phosphate
  modified_base 19: mod_base = OTHER; note = adenosine-3'-phosphate
  misc_feature 1..19: note = RNA
  misc_feature 20..21: note = DNA
tgaggctctgcatcccccatt

SEQ ID NO: 677 - DNA, 21 bp, synthetic construct
  source 1..21: mol_type = other DNA
  modified_base 1: mod_base = OTHER; note = adenosine-3'-phosphate
  modified_base 2: mod_base = OTHER; note = uridine-3'-phosphate
  modified_base 3: mod_base = OTHER; note = uridine-3'-phosphate
  modified_base 4: mod_base = OTHER; note = uridine-3'-phosphate
  modified_base 5: mod_base = OTHER; note = adenosine-3'-phosphate
  modified_base 6: mod_base = OTHER; note = uridine-3'-phosphate
  modified_base 7: mod_base = OTHER; note = uridine-3'-phosphate
  modified_base 8: mod_base = OTHER; note = uridine-3'-phosphate
  modified_base 9: mod_base = OTHER; note = guanosine-3'-phosphate
  modified_base 10: mod_base = OTHER; note = cytidine-3'-phosphate
  modified_base 11: mod_base = OTHER; note = uridine-3'-phosphate
  modified_base 12: mod_base = OTHER; note = cytidine-3'-phosphate
  modified_base 13: mod_base = OTHER; note = uridine-3'-phosphate
  modified_base 14: mod_base = OTHER; note = guanosine-3'-phosphate
  modified_base 15: mod_base = OTHER; note = adenosine-3'-phosphate
  modified_base 16: mod_base = OTHER; note = guanosine-3'-phosphate
  modified_base 17: mod_base = OTHER; note = guanosine-3'-phosphate
  modified_base 18: mod_base = OTHER; note = cytidine-3'-phosphate
  modified_base 19: mod_base = OTHER; note = uridine-3'-phosphate
  misc_feature 1..19: note = RNA
  misc_feature 20..21: note = DNA
atttatttgctctgaggcttt

SEQ ID NO: 678 - DNA, 21 bp, synthetic construct
  source 1..21: mol_type = other DNA
  modified_base 1: mod_base = OTHER; note = cytidine-3'-phosphate
  modified_base 2: mod_base = OTHER; note = uridine-3'-phosphate
  modified_base 3: mod_base = OTHER; note = cytidine-3'-phosphate
  modified_base 4: mod_base = OTHER; note = uridine-3'-phosphate
  modified_base 5: mod_base = OTHER; note = guanosine-3'-phosphate
  modified_base 6: mod_base = OTHER; note = adenosine-3'-phosphate
  modified_base 7: mod_base = OTHER; note = guanosine-3'-phosphate
  modified_base 8: mod_base = OTHER; note = guanosine-3'-phosphate
  modified_base 9: mod_base = OTHER; note = adenosine-3'-phosphate
  modified_base 10: mod_base = OTHER; note = adenosine-3'-phosphate
  modified_base 11: mod_base = OTHER; note = guanosine-3'-phosphate
  modified_base 12: mod_base = OTHER; note = adenosine-3'-phosphate
  modified_base 13: mod_base = OTHER; note = uridine-3'-phosphate
  modified_base 14: mod_base = OTHER; note = uridine-3'-phosphate
  modified_base 15: mod_base = OTHER; note = uridine-3'-phosphate
  modified_base 16: mod_base = OTHER; note = adenosine-3'-phosphate
  modified_base 17: mod_base = OTHER; note = uridine-3'-phosphate
  modified_base 18: mod_base = OTHER; note = uridine-3'-phosphate
  modified_base 19: mod_base = OTHER; note = uridine-3'-phosphate
  misc_feature 1..19: note = RNA
  misc_feature 20..21: note = DNA
ctctgaggaagatttattttt

SEQ ID NO: 679 - DNA, 21 bp, synthetic construct
  source 1..21: mol_type = other DNA
  modified_base 1: mod_base = OTHER; note = guanosine-3'-phosphate
  modified_base 2: mod_base = OTHER; note = guanosine-3'-phosphate
  modified_base 3: mod_base = OTHER; note = adenosine-3'-phosphate
  modified_base 4: mod_base = OTHER; note = guanosine-3'-phosphate
  modified_base 5: mod_base = OTHER; note = adenosine-3'-phosphate
  modified_base 6: mod_base = OTHER; note = adenosine-3'-phosphate
  modified_base 7: mod_base = OTHER; note = guanosine-3'-phosphate
  modified_base 8: mod_base = OTHER; note = cytidine-3'-phosphate
  modified_base 9: mod_base = OTHER; note = uridine-3'-phosphate
  modified_base 10: mod_base = OTHER; note = guanosine-3'-phosphate
  modified_base 11: mod_base = OTHER; note = guanosine-3'-phosphate
  modified_base 12: mod_base = OTHER; note = cytidine-3'-phosphate
  modified_base 13: mod_base = OTHER; note = uridine-3'-phosphate
  modified_base 14: mod_base = OTHER; note = cytidine-3'-phosphate
  modified_base 15: mod_base = OTHER; note = uridine-3'-phosphate
  modified_base 16: mod_base = OTHER; note = guanosine-3'-phosphate
  modified_base 17: mod_base = OTHER; note = adenosine-3'-phosphate
  modified_base 18: mod_base = OTHER; note = guanosine-3'-phosphate
  modified_base 19: mod_base = OTHER; note = guanosine-3'-phosphate
  misc_feature 1..19: note = RNA
  misc_feature 20..21: note = DNA
ggagaagctggctctgaggtt

SEQ ID NO: 680 - DNA, 21 bp, synthetic construct
  source 1..21: mol_type = other DNA
  modified_base 1: mod_base = OTHER; note = guanosine-3'-phosphate
  modified_base 2: mod_base = OTHER; note = adenosine-3'-phosphate
  modified_base 3: mod_base = OTHER; note = cytidine-3'-phosphate
  modified_base 4: mod_base = OTHER; note = adenosine-3'-phosphate
  modified_base 5: mod_base = OTHER; note = uridine-3'-phosphate
  modified_base 6: mod_base = OTHER; note = uridine-3'-phosphate
  modified_base 7: mod_base = OTHER; note = guanosine-3'-phosphate
  modified_base 8: mod_base = OTHER; note = adenosine-3'-phosphate
  modified_base 9: mod_base = OTHER; note = guanosine-3'-phosphate
  modified_base 10: mod_base = OTHER; note = adenosine-3'-phosphate
  modified_base 11: mod_base = OTHER; note = guanosine-3'-phosphate
  modified_base 12: mod_base = OTHER; note = guanosine-3'-phosphate
  modified_base 13: mod_base = OTHER; note = adenosine-3'-phosphate
  modified_base 14: mod_base = OTHER; note = guanosine-3'-phosphate
  modified_base 15: mod_base = OTHER; note = adenosine-3'-phosphate
  modified_base 16: mod_base = OTHER; note = adenosine-3'-phosphate
  modified_base 17: mod_base = OTHER; note = guanosine-3'-phosphate
  modified_base 18: mod_base = OTHER; note = cytidine-3'-phosphate
  modified_base 19: mod_base = OTHER; note = uridine-3'-phosphate
  misc_feature 1..19: note = RNA
  misc_feature 20..21: note = DNA
gacattgagaggagaagcttt

SEQ ID NO: 681 - DNA, 21 bp, synthetic construct
  source 1..21: mol_type = other DNA
  modified_base 1: mod_base = OTHER; note = adenosine-3'-phosphate
  modified_base 2: mod_base = OTHER; note = guanosine-3'-phosphate
  modified_base 3: mod_base = OTHER; note = adenosine-3'-phosphate
  modified_base 4: mod_base = OTHER; note = guanosine-3'-phosphate
  modified_base 5: mod_base = OTHER; note = cytidine-3'-phosphate
  modified_base 6: mod_base = OTHER; note = adenosine-3'-phosphate
  modified_base 7: mod_base = OTHER; note = guanosine-3'-phosphate
  modified_base 8: mod_base = OTHER; note = uridine-3'-phosphate
  modified_base 9: mod_base = OTHER; note = uridine-3'-phosphate
  modified_base 10: mod_base = OTHER; note = cytidine-3'-phosphate
  modified_base 11: mod_base = OTHER; note = adenosine-3'-phosphate
  modified_base 12: mod_base = OTHER; note = guanosine-3'-phosphate
  modified_base 13: mod_base = OTHER; note = adenosine-3'-phosphate
  modified_base 14: mod_base = OTHER; note = cytidine-3'-phosphate
  modified_base 15: mod_base = OTHER; note = adenosine-3'-phosphate
  modified_base 16: mod_base = OTHER; note = uridine-3'-phosphate
  modified_base 17: mod_base = OTHER; note = uridine-3'-phosphate
  modified_base 18: mod_base = OTHER; note = guanosine-3'-phosphate
  modified_base 19: mod_base = OTHER; note = adenosine-3'-phosphate
  misc_feature 1..19: note = RNA
  misc_feature 20..21: note = DNA
agagcagttcagacattgatt

SEQ ID NO: 682 - DNA, 21 bp, synthetic construct
  source 1..21: mol_type = other DNA
  modified_base 1: mod_base = OTHER; note = guanosine-3'-phosphate
  modified_base 2: mod_base = OTHER; note = guanosine-3'-phosphate
  modified_base 3: mod_base = OTHER; note = adenosine-3'-phosphate
  modified_base 4: mod_base = OTHER; note = adenosine-3'-phosphate
  modified_base 5: mod_base = OTHER; note = uridine-3'-phosphate
  modified_base 6: mod_base = OTHER; note = guanosine-3'-phosphate
  modified_base 7: mod_base = OTHER; note = cytidine-3'-phosphate
  modified_base 8: mod_base = OTHER; note = cytidine-3'-phosphate
  modified_base 9: mod_base = OTHER; note = cytidine-3'-phosphate
  modified_base 10: mod_base = OTHER; note = adenosine-3'-phosphate
  modified_base 11: mod_base = OTHER; note = guanosine-3'-phosphate
  modified_base 12: mod_base = OTHER; note = cytidine-3'-phosphate
  modified_base 13: mod_base = OTHER; note = cytidine-3'-phosphate
  modified_base 14: mod_base = OTHER; note = adenosine-3'-phosphate
  modified_base 15: mod_base = OTHER; note = guanosine-3'-phosphate
  modified_base 16: mod_base = OTHER; note = adenosine-3'-phosphate
  modified_base 17: mod_base = OTHER; note = guanosine-3'-phosphate
  modified_base 18: mod_base = OTHER; note = cytidine-3'-phosphate
  modified_base 19: mod_base = OTHER; note = adenosine-3'-phosphate
  misc_feature 1..19: note = RNA
  misc_feature 20..21: note = DNA
ggaatgcccagccagagcatt

SEQ ID NO: 683 - DNA, 21 bp, synthetic construct
  source 1..21: mol_type = other DNA
  modified_base 1: mod_base = OTHER; note = adenosine-3'-phosphate
  modified_base 2: mod_base = OTHER; note = guanosine-3'-phosphate
  modified_base 3: mod_base = OTHER; note = adenosine-3'-phosphate
  modified_base 4: mod_base = OTHER; note = guanosine-3'-phosphate
  modified_base 5: mod_base = OTHER; note = cytidine-3'-phosphate
  modified_base 6: mod_base = OTHER; note = cytidine-3'-phosphate
  modified_base 7: mod_base = OTHER; note = uridine-3'-phosphate
  modified_base 8: mod_base = OTHER; note = cytidine-3'-phosphate
  modified_base 9: mod_base = OTHER; note = adenosine-3'-phosphate
  modified_base 10: mod_base = OTHER; note = guanosine-3'-phosphate
  modified_base 11: mod_base = OTHER; note = guanosine-3'-phosphate
  modified_base 12: mod_base = OTHER; note = adenosine-3'-phosphate
  modified_base 13: mod_base = OTHER; note = adenosine-3'-phosphate
  modified_base 14: mod_base = OTHER; note = uridine-3'-phosphate
  modified_base 15: mod_base = OTHER; note = guanosine-3'-phosphate
  modified_base 16: mod_base = OTHER; note = cytidine-3'-phosphate
  modified_base 17: mod_base = OTHER; note = cytidine-3'-phosphate
  modified_base 18: mod_base = OTHER; note = cytidine-3'-phosphate
  modified_base 19: mod_base = OTHER; note = adenosine-3'-phosphate
  misc_feature 1..19: note = RNA
  misc_feature 20..21: note = DNA
agagcctcaggaatgcccatt

SEQ ID NO: 684 - DNA, 21 bp, synthetic construct
  source 1..21: mol_type = other DNA
  modified_base 1: mod_base = OTHER; note = adenosine-3'-phosphate
  modified_base 2: mod_base = OTHER; note = uridine-3'-phosphate
  modified_base 3: mod_base = OTHER; note = cytidine-3'-phosphate
  modified_base 4: mod_base = OTHER; note = guanosine-3'-phosphate
  modified_base 5: mod_base = OTHER; note = adenosine-3'-phosphate
  modified_base 6: mod_base = OTHER; note = adenosine-3'-phosphate
  modified_base 7: mod_base = OTHER; note = guanosine-3'-phosphate
  modified_base 8: mod_base = OTHER; note = adenosine-3'-phosphate
  modified_base 9: mod_base = OTHER; note = guanosine-3'-phosphate
  modified_base 10: mod_base = OTHER; note = uridine-3'-phosphate
  modified_base 11: mod_base = OTHER; note = cytidine-3'-phosphate
  modified_base 12: mod_base = OTHER; note = adenosine-3'-phosphate
  modified_base 13: mod_base = OTHER; note = guanosine-3'-phosphate
  modified_base 14: mod_base = OTHER; note = adenosine-3'-phosphate
  modified_base 15: mod_base = OTHER; note = guanosine-3'-phosphate
  modified_base 16: mod_base = OTHER; note = cytidine-3'-phosphate
  modified_base 17: mod_base = OTHER; note = cytidine-3'-phosphate
  modified_base 18: mod_base = OTHER; note = uridine-3'-phosphate
  modified_base 19: mod_base = OTHER; note = cytidine-3'-phosphate
  misc_feature 1..19: note = RNA
  misc_feature 20..21: note = DNA
atcgaagagtcagagcctctt

SEQ ID NO: 685 - DNA, 21 bp, synthetic construct
  source 1..21: mol_type = other DNA
  modified_base 1: mod_base = OTHER; note = adenosine-3'-phosphate
  modified_base 2: mod_base = OTHER; note = guanosine-3'-phosphate
  modified_base 3: mod_base = OTHER; note = guanosine-3'-phosphate
  modified_base 4: mod_base = OTHER; note = uridine-3'-phosphate
  modified_base 5: mod_base = OTHER; note = uridine-3'-phosphate
  modified_base 6: mod_base = OTHER; note = adenosine-3'-phosphate
  modified_base 7: mod_base = OTHER; note = adenosine-3'-phosphate
  modified_base 8: mod_base = OTHER; note = uridine-3'-phosphate
  modified_base 9: mod_base = OTHER; note = uridine-3'-phosphate
  modified_base 10: mod_base = OTHER; note = uridine-3'-phosphate
  modified_base 11: mod_base = OTHER; note = guanosine-3'-phosphate
  modified_base 12: mod_base = OTHER; note = guanosine-3'-phosphate
  modified_base 13: mod_base = OTHER; note = guanosine-3'-phosphate
  modified_base 14: mod_base = OTHER; note = guanosine-3'-phosphate
  modified_base 15: mod_base = OTHER; note = adenosine-3'-phosphate
  modified_base 16: mod_base = OTHER; note = adenosine-3'-phosphate
  modified_base 17: mod_base = OTHER; note = uridine-3'-phosphate
  modified_base 18: mod_base = OTHER; note = guanosine-3'-phosphate
  modified_base 19: mod_base = OTHER; note = guanosine-3'-phosphate
  misc_feature 1..19: note = RNA
  misc_feature 20..21: note = DNA
aggttaatttggggaatggtt

SEQ ID NO: 686 - DNA, 21 bp, synthetic construct
  source 1..21: mol_type = other DNA
  modified_base 1: mod_base = OTHER; note = guanosine-3'-phosphate
  modified_base 2: mod_base = OTHER; note = cytidine-3'-phosphate
  modified_base 3: mod_base = OTHER; note = cytidine-3'-phosphate
  modified_base 4: mod_base = OTHER; note = uridine-3'-phosphate
  modified_base 5: mod_base = OTHER; note = guanosine-3'-phosphate
  modified_base 6: mod_base = OTHER; note = guanosine-3'-phosphate
  modified_base 7: mod_base = OTHER; note = guanosine-3'-phosphate
  modified_base 8: mod_base = OTHER; note = cytidine-3'-phosphate
  modified_base 9: mod_base = OTHER; note = guanosine-3'-phosphate
  modified_base 10: mod_base = OTHER; note = guanosine-3'-phosphate
  modified_base 11: mod_base = OTHER; note = adenosine-3'-phosphate
  modified_base 12: mod_base = OTHER; note = guanosine-3'-phosphate
  modified_base 13: mod_base = OTHER; note = adenosine-3'-phosphate
  modified_base 14: mod_base = OTHER; note = guanosine-3'-phosphate
  modified_base 15: mod_base = OTHER; note = guanosine-3'-phosphate
  modified_base 16: mod_base = OTHER; note = uridine-3'-phosphate
  modified_base 17: mod_base = OTHER; note = uridine-3'-phosphate
  modified_base 18: mod_base = OTHER; note = adenosine-3'-phosphate
  modified_base 19: mod_base = OTHER; note = adenosine-3'-phosphate
  misc_feature 1..19: note = RNA
  misc_feature 20..21: note = DNA
gcctgggcggagaggttaatt

SEQ ID NO: 687 - DNA, 21 bp, synthetic construct
  source 1..21: mol_type = other DNA
  modified_base 1: mod_base = OTHER; note = cytidine-3'-phosphate
  modified_base 2: mod_base = OTHER; note = cytidine-3'-phosphate
  modified_base 3: mod_base = OTHER; note = cytidine-3'-phosphate
  modified_base 4: mod_base = OTHER; note = uridine-3'-phosphate
  modified_base 5: mod_base = OTHER; note = cytidine-3'-phosphate
  modified_base 6: mod_base = OTHER; note = cytidine-3'-phosphate
  modified_base 7: mod_base = OTHER; note = uridine-3'-phosphate
  modified_base 8: mod_base = OTHER; note = cytidine-3'-phosphate
  modified_base 9: mod_base = OTHER; note = uridine-3'-phosphate
  modified_base 10: mod_base = OTHER; note = guanosine-3'-phosphate
  modified_base 11: mod_base = OTHER; note = guanosine-3'-phosphate
  modified_base 12: mod_base = OTHER; note = guanosine-3'-phosphate
  modified_base 13: mod_base = OTHER; note = cytidine-3'-phosphate
  modified_base 14: mod_base = OTHER; note = cytidine-3'-phosphate
  modified_base 15: mod_base = OTHER; note = uridine-3'-phosphate
  modified_base 16: mod_base = OTHER; note = guanosine-3'-phosphate
  modified_base 17: mod_base = OTHER; note = guanosine-3'-phosphate
  modified_base 18: mod_base = OTHER; note = guanosine-3'-phosphate
  modified_base 19: mod_base = OTHER; note = cytidine-3'-phosphate
  misc_feature 1..19: note = RNA
  misc_feature 20..21: note = DNA
ccctcctctgggcctgggctt

SEQ ID NO: 688 - DNA, 21 bp, synthetic construct
  source 1..21: mol_type = other DNA
  modified_base 1: mod_base = OTHER; note = cytidine-3'-phosphate
  modified_base 2: mod_base = OTHER; note = cytidine-3'-phosphate
  modified_base 3: mod_base = OTHER; note = adenosine-3'-phosphate
  modified_base 4: mod_base = OTHER; note = guanosine-3'-phosphate
  modified_base 5: mod_base = OTHER; note = guanosine-3'-phosphate
  modified_base 6: mod_base = OTHER; note = cytidine-3'-phosphate
  modified_base 7: mod_base = OTHER; note = adenosine-3'-phosphate
  modified_base 8: mod_base = OTHER; note = guanosine-3'-phosphate
  modified_base 9: mod_base = OTHER; note = cytidine-3'-phosphate
  modified_base 10: mod_base = OTHER; note = cytidine-3'-phosphate
  modified_base 11: mod_base = OTHER; note = cytidine-3'-phosphate
  modified_base 12: mod_base = OTHER; note = cytidine-3'-phosphate
  modified_base 13: mod_base = OTHER; note = uridine-3'-phosphate
  modified_base 14: mod_base = OTHER; note = cytidine-3'-phosphate
  modified_base 15: mod_base = OTHER; note = cytidine-3'-phosphate
  modified_base 16: mod_base = OTHER; note = uridine-3'-phosphate
  modified_base 17: mod_base = OTHER; note = cytidine-3'-phosphate
  modified_base 18: mod_base = OTHER; note = uridine-3'-phosphate
  modified_base 19: mod_base = OTHER; note = guanosine-3'-phosphate
  misc_feature 1..19: note = RNA
  misc_feature 20..21: note = DNA
ccaggcagcccctcctctgtt

SEQ ID NO: 689 - DNA, 21 bp, synthetic construct
  source 1..21: mol_type = other DNA
  modified_base 1: mod_base = OTHER; note = cytidine-3'-phosphate
  modified_base 2: mod_base = OTHER; note = guanosine-3'-phosphate
  modified_base 3: mod_base = OTHER; note = cytidine-3'-phosphate
  modified_base 4: mod_base = OTHER; note = uridine-3'-phosphate
  modified_base 5: mod_base = OTHER; note = guanosine-3'-phosphate
  modified_base 6: mod_base = OTHER; note = cytidine-3'-phosphate
  modified_base 7: mod_base = OTHER; note = uridine-3'-phosphate
  modified_base 8: mod_base = OTHER; note = cytidine-3'-phosphate
  modified_base 9: mod_base = OTHER; note = uridine-3'-phosphate
  modified_base 10: mod_base = OTHER; note = adenosine-3'-phosphate
  modified_base 11: mod_base = OTHER; note = guanosine-3'-phosphate
  modified_base 12: mod_base = OTHER; note = cytidine-3'-phosphate
  modified_base 13: mod_base = OTHER; note = cytidine-3'-phosphate
  modified_base 14: mod_base = OTHER; note = cytidine-3'-phosphate
  modified_base 15: mod_base = OTHER; note = adenosine-3'-phosphate
  modified_base 16: mod_base = OTHER; note = guanosine-3'-phosphate
  modified_base 17: mod_base = OTHER; note = guanosine-3'-phosphate
  modified_base 18: mod_base = OTHER; note = cytidine-3'-phosphate
  modified_base 19: mod_base = OTHER; note = adenosine-3'-phosphate
  misc_feature 1..19: note = RNA
  misc_feature 20..21: note = DNA
cgctgctctagcccaggcatt

SEQ ID NO: 690 - DNA, 21 bp, synthetic construct
  source 1..21: mol_type = other DNA
  modified_base 1: mod_base = OTHER; note = guanosine-3'-phosphate
  modified_base 2: mod_base = OTHER; note = guanosine-3'-phosphate
  modified_base 3: mod_base = OTHER; note = guanosine-3'-phosphate
  modified_base 4: mod_base = OTHER; note = cytidine-3'-phosphate
  modified_base 5: mod_base = OTHER; note = adenosine-3'-phosphate
  modified_base 6: mod_base = OTHER; note = cytidine-3'-phosphate
  modified_base 7: mod_base = OTHER; note = uridine-3'-phosphate
  modified_base 8: mod_base = OTHER; note = uridine-3'-phosphate
  modified_base 9: mod_base = OTHER; note = cytidine-3'-phosphate
  modified_base 10: mod_base = OTHER; note = uridine-3'-phosphate
  modified_base 11: mod_base = OTHER; note = cytidine-3'-phosphate
  modified_base 12: mod_base = OTHER; note = guanosine-3'-phosphate
  modified_base 13: mod_base = OTHER; note = cytidine-3'-phosphate
  modified_base 14: mod_base = OTHER; note = uridine-3'-phosphate
  modified_base 15: mod_base = OTHER; note = guanosine-3'-phosphate
  modified_base 16: mod_base = OTHER; note = cytidine-3'-phosphate
  modified_base 17: mod_base = OTHER; note = uridine-3'-phosphate
  modified_base 18: mod_base = OTHER; note = cytidine-3'-phosphate
  modified_base 19: mod_base = OTHER; note = uridine-3'-phosphate
  misc_feature 1..19: note = RNA
  misc_feature 20..21: note = DNA
gggcacttctcgctgctcttt

SEQ ID NO: 691 - DNA, 21 bp, synthetic construct
  source 1..21: mol_type = other DNA
  modified_base 1: mod_base = OTHER; note = uridine-3'-phosphate
  modified_base 2: mod_base = OTHER; note = guanosine-3'-phosphate
  modified_base 3: mod_base = OTHER; note = guanosine-3'-phosphate
  modified_base 4: mod_base = OTHER; note = cytidine-3'-phosphate
  modified_base 5: mod_base = OTHER; note = adenosine-3'-phosphate
  modified_base 6: mod_base = OTHER; note = adenosine-3'-phosphate
  modified_base 7: mod_base = OTHER; note = guanosine-3'-phosphate
  modified_base 8: mod_base = OTHER; note = cytidine-3'-phosphate
  modified_base 9: mod_base = OTHER; note = cytidine-3'-phosphate
  modified_base 10: mod_base = OTHER; note = cytidine-3'-phosphate
  modified_base 11: mod_base = OTHER; note = adenosine-3'-phosphate
  modified_base 12: mod_base = OTHER; note = guanosine-3'-phosphate
  modified_base 13: mod_base = OTHER; note = guanosine-3'-phosphate
  modified_base 14: mod_base = OTHER; note = guanosine-3'-phosphate
  modified_base 15: mod_base = OTHER; note = cytidine-3'-phosphate
  modified_base 16: mod_base = OTHER; note = adenosine-3'-phosphate
  modified_base 17: mod_base = OTHER; note = cytidine-3'-phosphate
  modified_base 18: mod_base = OTHER; note = uridine-3'-phosphate
  modified_base 19: mod_base = OTHER; note = uridine-3'-phosphate
  misc_feature 1..19: note = RNA
  misc_feature 20..21: note = DNA
tggcaagcccagggcactttt

SEQ ID NO: 692 - DNA, 21 bp, synthetic construct
  source 1..21: mol_type = other DNA
  modified_base 1: mod_base = OTHER; note = adenosine-3'-phosphate
  modified_base 2: mod_base = OTHER; note = guanosine-3'-phosphate
  modified_base 3: mod_base = OTHER; note = guanosine-3'-phosphate
  modified_base 4: mod_base = OTHER; note = guanosine-3'-phosphate
  modified_base 5: mod_base = OTHER; note = cytidine-3'-phosphate
  modified_base 6: mod_base = OTHER; note = adenosine-3'-phosphate
  modified_base 7: mod_base = OTHER; note = guanosine-3'-phosphate
  modified_base 8: mod_base = OTHER; note = adenosine-3'-phosphate
  modified_base 9: mod_base = OTHER; note = guanosine-3'-phosphate
  modified_base 10: mod_base = OTHER; note = cytidine-3'-phosphate
  modified_base 11: mod_base = OTHER; note = uridine-3'-phosphate
  modified_base 12: mod_base = OTHER; note = guanosine-3'-phosphate
  modified_base 13: mod_base = OTHER; note = guanosine-3'-phosphate
  modified_base 14: mod_base = OTHER; note = uridine-3'-phosphate
  modified_base 15: mod_base = OTHER; note = guanosine-3'-phosphate
  modified_base 16: mod_base = OTHER; note = guanosine-3'-phosphate
  modified_base 17: mod_base = OTHER; note = cytidine-3'-phosphate
  modified_base 18: mod_base = OTHER; note = adenosine-3'-phosphate
  modified_base 19: mod_base = OTHER; note = adenosine-3'-phosphate
  misc_feature 1..19: note = RNA
  misc_feature 20..21: note = DNA
agggcagagctggtggcaatt

SEQ ID NO: 693 - DNA, 21 bp, synthetic construct
  source 1..21: mol_type = other DNA
  modified_base 1: mod_base = OTHER; note = cytidine-3'-phosphate
  modified_base 2: mod_base = OTHER; note = uridine-3'-phosphate
  modified_base 3: mod_base = OTHER; note = cytidine-3'-phosphate
  modified_base 4: mod_base = OTHER; note = cytidine-3'-phosphate
  modified_base 5: mod_base = OTHER; note = cytidine-3'-phosphate
  modified_base 6: mod_base = OTHER; note = cytidine-3'-phosphate
  modified_base 7: mod_base = OTHER; note = adenosine-3'-phosphate
  modified_base 8: mod_base = OTHER; note = guanosine-3'-phosphate
  modified_base 9: mod_base = OTHER; note = cytidine-3'-phosphate
  modified_base 10: mod_base = OTHER; note = cytidine-3'-phosphate
  modified_base 11: mod_base = OTHER; note = adenosine-3'-phosphate
  modified_base 12: mod_base = OTHER; note = guanosine-3'-phosphate
  modified_base 13: mod_base = OTHER; note = guanosine-3'-phosphate
  modified_base 14: mod_base = OTHER; note = guanosine-3'-phosphate
  modified_base 15: mod_base = OTHER; note = cytidine-3'-phosphate
  modified_base 16: mod_base = OTHER; note = adenosine-3'-phosphate
  modified_base 17: mod_base = OTHER; note = guanosine-3'-phosphate
  modified_base 18: mod_base = OTHER; note = adenosine-3'-phosphate
  modified_base 19: mod_base = OTHER; note = guanosine-3'-phosphate
  misc_feature 1..19: note = RNA
  misc_feature 20..21: note = DNA
ctccccagccagggcagagtt

SEQ ID NO: 694 - DNA, 21 bp, synthetic construct
  source 1..21: mol_type = other DNA
  modified_base 1: mod_base = OTHER; note = adenosine-3'-phosphate
  modified_base 2: mod_base = OTHER; note = cytidine-3'-phosphate
  modified_base 3: mod_base = OTHER; note = cytidine-3'-phosphate
  modified_base 4: mod_base = OTHER; note = guanosine-3'-phosphate
  modified_base 5: mod_base = OTHER; note = adenosine-3'-phosphate
  modified_base 6: mod_base = OTHER; note = guanosine-3'-phosphate
  modified_base 7: mod_base = OTHER; note = uridine-3'-phosphate
  modified_base 8: mod_base = OTHER; note = guanosine-3'-phosphate
  modified_base 9: mod_base = OTHER; note = uridine-3'-phosphate
  modified_base 10: mod_base = OTHER; note = cytidine-3'-phosphate
  modified_base 11: mod_base = OTHER; note = cytidine-3'-phosphate
  modified_base 12: mod_base = OTHER; note = uridine-3'-phosphate
  modified_base 13: mod_base = OTHER; note = cytidine-3'-phosphate
  modified_base 14: mod_base = OTHER; note = cytidine-3'-phosphate
  modified_base 15: mod_base = OTHER; note = cytidine-3'-phosphate
  modified_base 16: mod_base = OTHER; note = cytidine-3'-phosphate
  modified_base 17: mod_base = OTHER; note = adenosine-3'-phosphate
  modified_base 18: mod_base = OTHER; note = guanosine-3'-phosphate
  modified_base 19: mod_base = OTHER; note = cytidine-3'-phosphate
  misc_feature 1..19: note = RNA
  misc_feature 20..21: note = DNA
accgagtgtcctccccagctt

SEQ ID NO: 695 - DNA, 21 bp, synthetic construct
  source 1..21: mol_type = other DNA
  modified_base 1: mod_base = OTHER; note = uridine-3'-phosphate
  modified_base 2: mod_base = OTHER; note = guanosine-3'-phosphate
  modified_base 3: mod_base = OTHER; note = guanosine-3'-phosphate
  modified_base 4: mod_base = OTHER; note = cytidine-3'-phosphate
  modified_base 5: mod_base = OTHER; note = adenosine-3'-phosphate
  modified_base 6: mod_base = OTHER; note = guanosine-3'-phosphate
  modified_base 7: mod_base = OTHER; note = guanosine-3'-phosphate
  modified_base 8: mod_base = OTHER; note = uridine-3'-phosphate
  modified_base 9: mod_base = OTHER; note = uridine-3'-phosphate
  modified_base 10: mod_base = OTHER; note = cytidine-3'-phosphate
  modified_base 11: mod_base = OTHER; note = adenosine-3'-phosphate
  modified_base 12: mod_base = OTHER; note = cytidine-3'-phosphate
  modified_base 13: mod_base = OTHER; note = uridine-3'-phosphate
  modified_base 14: mod_base = OTHER; note = guanosine-3'-phosphate
  modified_base 15: mod_base = OTHER; note = guanosine-3'-phosphate
  modified_base 16: mod_base = OTHER; note = guanosine-3'-phosphate
  modified_base 17: mod_base = OTHER; note = uridine-3'-phosphate
  modified_base 18: mod_base = OTHER; note = guanosine-3'-phosphate
  modified_base 19: mod_base = OTHER; note = uridine-3'-phosphate
  misc_feature 1..19: note = RNA
  misc_feature 20..21: note = DNA
tggcaggttcactgggtgttt

SEQ ID NO: 696 - DNA, 21 bp, synthetic construct
  source 1..21: mol_type = other DNA
  modified_base 1: mod_base = OTHER; note = adenosine-3'-phosphate
  modified_base 2: mod_base = OTHER; note = cytidine-3'-phosphate
  modified_base 3: mod_base = OTHER; note = guanosine-3'-phosphate
  modified_base 4: mod_base = OTHER; note = guanosine-3'-phosphate
  modified_base 5: mod_base = OTHER; note = uridine-3'-phosphate
  modified_base 6: mod_base = OTHER; note = uridine-3'-phosphate
  modified_base 7: mod_base = OTHER; note = uridine-3'-phosphate
  modified_base 8: mod_base = OTHER; note = cytidine-3'-phosphate
  modified_base 9: mod_base = OTHER; note = uridine-3'-phosphate
  modified_base 10: mod_base = OTHER; note = uridine-3'-phosphate
  modified_base 11: mod_base = OTHER; note = uridine-3'-phosphate
  modified_base 12: mod_base = OTHER; note = guanosine-3'-phosphate
  modified_base 13: mod_base = OTHER; note = guanosine-3'-phosphate
  modified_base 14: mod_base = OTHER; note = cytidine-3'-phosphate
  modified_base 15: mod_base = OTHER; note = adenosine-3'-phosphate
  modified_base 16: mod_base = OTHER; note = guanosine-3'-phosphate
  modified_base 17: mod_base = OTHER; note = guanosine-3'-phosphate
  modified_base 18: mod_base = OTHER; note = uridine-3'-phosphate
  modified_base 19: mod_base = OTHER; note = uridine-3'-phosphate
  misc_feature 1..19: note = RNA
  misc_feature 20..21: note = DNA
acggtttctttggcaggtttt

SEQ ID NO: 697 - DNA, 21 bp, synthetic construct
  source 1..21: mol_type = other DNA
  modified_base 1: mod_base = OTHER; note = adenosine-3'-phosphate
  modified_base 2: mod_base = OTHER; note = adenosine-3'-phosphate
  modified_base 3: mod_base = OTHER; note = guanosine-3'-phosphate
  modified_base 4: mod_base = OTHER; note = adenosine-3'-phosphate
  modified_base 5: mod_base = OTHER; note = guanosine-3'-phosphate
  modified_base 6: mod_base = OTHER; note = cytidine-3'-phosphate
  modified_base 7: mod_base = OTHER; note = uridine-3'-phosphate
  modified_base 8: mod_base = OTHER; note = cytidine-3'-phosphate
  modified_base 9: mod_base = OTHER; note = uridine-3'-phosphate
  modified_base 10: mod_base = OTHER; note = cytidine-3'-phosphate
  modified_base 11: mod_base = OTHER; note = adenosine-3'-phosphate
  modified_base 12: mod_base = OTHER; note = cytidine-3'-phosphate
  modified_base 13: mod_base = OTHER; note = guanosine-3'-phosphate
  modified_base 14: mod_base = OTHER; note = guanosine-3'-phosphate
  modified_base 15: mod_base = OTHER; note = uridine-3'-phosphate
  modified_base 16: mod_base = OTHER; note = uridine-3'-phosphate
  modified_base 17: mod_base = OTHER; note = uridine-3'-phosphate
  modified_base 18: mod_base = OTHER; note = cytidine-3'-phosphate
  modified_base 19: mod_base = OTHER; note = uridine-3'-phosphate
  misc_feature 1..19: note = RNA
  misc_feature 20..21: note = DNA
aagagctctcacggtttcttt

SEQ ID NO: 698 - DNA, 21 bp, synthetic construct
  source 1..21: mol_type = other DNA
  modified_base 1: mod_base = OTHER; note = adenosine-3'-phosphate
  modified_base 2: mod_base = OTHER; note = cytidine-3'-phosphate
  modified_base 3: mod_base = OTHER; note = guanosine-3'-phosphate
  modified_base 4: mod_base = OTHER; note = cytidine-3'-phosphate
  modified_base 5: mod_base = OTHER; note = adenosine-3'-phosphate
  modified_base 6: mod_base = OTHER; note = guanosine-3'-phosphate
  modified_base 7: mod_base = OTHER; note = guanosine-3'-phosphate
  modified_base 8: mod_base = OTHER; note = guanosine-3'-phosphate
  modified_base 9: mod_base = OTHER; note = cytidine-3'-phosphate
  modified_base 10: mod_base = OTHER; note = cytidine-3'-phosphate
  modified_base 11: mod_base = OTHER; note = cytidine-3'-phosphate
  modified_base 12: mod_base = OTHER; note = cytidine-3'-phosphate
  modified_base 13: mod_base = OTHER; note = guanosine-3'-phosphate
  modified_base 14: mod_base = OTHER; note = adenosine-3'-phosphate
  modified_base 15: mod_base = OTHER; note = adenosine-3'-phosphate
  modified_base 16: mod_base = OTHER; note = guanosine-3'-phosphate
  modified_base 17: mod_base = OTHER; note = adenosine-3'-phosphate
  modified_base 18: mod_base = OTHER; note = guanosine-3'-phosphate
  modified_base 19: mod_base = OTHER; note = cytidine-3'-phosphate
  misc_feature 1..19: note = RNA
  misc_feature 20..21: note = DNA
acgcagggccccgaagagctt

SEQ ID NO: 699 - DNA, 21 bp, synthetic construct
  source 1..21: mol_type = other DNA
  modified_base 1: mod_base = OTHER; note = guanosine-3'-phosphate
  modified_base 2: mod_base = OTHER; note = adenosine-3'-phosphate
  modified_base 3: mod_base = OTHER; note = guanosine-3'-phosphate
  modified_base 4: mod_base = OTHER; note = uridine-3'-phosphate
  modified_base 5: mod_base = OTHER; note = cytidine-3'-phosphate
  modified_base 6: mod_base = OTHER; note = uridine-3'-phosphate
  modified_base 7: mod_base = OTHER; note = guanosine-3'-phosphate
  modified_base 8: mod_base = OTHER; note = cytidine-3'-phosphate
  modified_base 9: mod_base = OTHER; note = adenosine-3'-phosphate
  modified_base 10: mod_base = OTHER; note = cytidine-3'-phosphate
  modified_base 11: mod_base = OTHER; note = adenosine-3'-phosphate
  modified_base 12: mod_base = OTHER; note = adenosine-3'-phosphate
  modified_base 13: mod_base = OTHER; note = cytidine-3'-phosphate
  modified_base 14: mod_base = OTHER; note = guanosine-3'-phosphate
  modified_base 15: mod_base = OTHER; note = cytidine-3'-phosphate
  modified_base 16: mod_base = OTHER; note = adenosine-3'-phosphate
  modified_base 17: mod_base = OTHER; note = guanosine-3'-phosphate
  modified_base 18: mod_base = OTHER; note = guanosine-3'-phosphate
  modified_base 19: mod_base = OTHER; note = guanosine-3'-phosphate
  misc_feature 1..19: note = RNA
  misc_feature 20..21: note = DNA
gagtctgcacaacgcagggtt

SEQ ID NO: 700 - DNA, 21 bp, synthetic construct
  source 1..21: mol_type = other DNA
  modified_base 1: mod_base = OTHER; note = uridine-3'-phosphate
  modified_base 2: mod_base = OTHER; note = guanosine-3'-phosphate
  modified_base 3: mod_base = OTHER; note = uridine-3'-phosphate
  modified_base 4: mod_base = OTHER; note = guanosine-3'-phosphate
  modified_base 5: mod_base = OTHER; note = guanosine-3'-phosphate
  modified_base 6: mod_base = OTHER; note = guanosine-3'-phosphate
  modified_base 7: mod_base = OTHER; note = adenosine-3'-phosphate
  modified_base 8: mod_base = OTHER; note = adenosine-3'-phosphate
  modified_base 9: mod_base = OTHER; note = uridine-3'-phosphate
  modified_base 10: mod_base = OTHER; note = adenosine-3'-phosphate
  modified_base 11: mod_base = OTHER; note = guanosine-3'-phosphate
  modified_base 12: mod_base = OTHER; note = adenosine-3'-phosphate
  modified_base 13: mod_base = OTHER; note = guanosine-3'-phosphate
  modified_base 14: mod_base = OTHER; note = uridine-3'-phosphate
  modified_base 15: mod_base = OTHER; note = cytidine-3'-phosphate
  modified_base 16: mod_base = OTHER; note = uridine-3'-phosphate
  modified_base 17: mod_base = OTHER; note = guanosine-3'-phosphate
  modified_base 18: mod_base = OTHER; note = cytidine-3'-phosphate
  modified_base 19: mod_base = OTHER; note = adenosine-3'-phosphate
  misc_feature 1..19: note = RNA
  misc_feature 20..21: note = DNA
tgtgggaatagagtctgcatt

SEQ ID NO: 701 - DNA, 21 bp, synthetic construct
  source 1..21: mol_type = other DNA
  modified_base 1: mod_base = OTHER; note = adenosine-3'-phosphate
  modified_base 2: mod_base = OTHER; note = guanosine-3'-phosphate
  modified_base 3: mod_base = OTHER; note = cytidine-3'-phosphate
  modified_base 4: mod_base = OTHER; note = uridine-3'-phosphate
  modified_base 5: mod_base = OTHER; note = uridine-3'-phosphate
  modified_base 6: mod_base = OTHER; note = cytidine-3'-phosphate
  modified_base 7: mod_base = OTHER; note = uridine-3'-phosphate
  modified_base 8: mod_base = OTHER; note = guanosine-3'-phosphate
  modified_base 9: mod_base = OTHER; note = adenosine-3'-phosphate
  modified_base 10: mod_base = OTHER; note = guanosine-3'-phosphate
  modified_base 11: mod_base = OTHER; note = cytidine-3'-phosphate
  modified_base 12: mod_base = OTHER; note = uridine-3'-phosphate
  modified_base 13: mod_base = OTHER; note = guanosine-3'-phosphate
  modified_base 14: mod_base = OTHER; note = uridine-3'-phosphate
  modified_base 15: mod_base = OTHER; note = guanosine-3'-phosphate
  modified_base 16: mod_base = OTHER; note = guanosine-3'-phosphate
  modified_base 17: mod_base = OTHER; note = guanosine-3'-phosphate
  modified_base 18: mod_base = OTHER; note = adenosine-3'-phosphate
  modified_base 19: mod_base = OTHER; note = adenosine-3'-phosphate
  misc_feature 1..19: note = RNA
  misc_feature 20..21: note = DNA
agcttctgagctgtgggaatt

SEQ ID NO: 702 - DNA, 21 bp, synthetic construct
  source 1..21: mol_type = other DNA
  modified_base 1: mod_base = OTHER; note = uridine-3'-phosphate
  modified_base 2: mod_base = OTHER; note = guanosine-3'-phosphate
  modified_base 3: mod_base = OTHER; note = uridine-3'-phosphate
  modified_base 4: mod_base = OTHER; note = guanosine-3'-phosphate
  modified_base 5: mod_base = OTHER; note = guanosine-3'-phosphate
  modified_base 6: mod_base = OTHER; note = adenosine-3'-phosphate
  modified_base 7: mod_base = OTHER; note = cytidine-3'-phosphate
  modified_base 8: mod_base = OTHER; note = uridine-3'-phosphate
  modified_base 9: mod_base = OTHER; note = cytidine-3'-phosphate
  modified_base 10: mod_base = OTHER; note = cytidine-3'-phosphate
  modified_base 11: mod_base = OTHER; note = cytidine-3'-phosphate
  modified_base 12: mod_base = OTHER; note = adenosine-3'-phosphate
  modified_base 13: mod_base = OTHER; note = guanosine-3'-phosphate
  modified_base 14: mod_base = OTHER; note = cytidine-3'-phosphate
  modified_base 15: mod_base = OTHER; note = uridine-3'-phosphate
  modified_base 16: mod_base = OTHER; note = uridine-3'-phosphate
  modified_base 17: mod_base = OTHER; note = cytidine-3'-phosphate
  modified_base 18: mod_base = OTHER; note = uridine-3'-phosphate
  modified_base 19: mod_base = OTHER; note = guanosine-3'-phosphate
  misc_feature 1..19: note = RNA
  misc_feature 20..21: note = DNA
tgtggactcccagcttctgtt

SEQ ID NO: 703 - DNA, 21 bp, synthetic construct
  source 1..21: mol_type = other DNA
  modified_base 1: mod_base = OTHER; note = adenosine-3'-phosphate
  modified_base 2: mod_base = OTHER; note = guanosine-3'-phosphate
  modified_base 3: mod_base = OTHER; note = cytidine-3'-phosphate
  modified_base 4: mod_base = OTHER; note = uridine-3'-phosphate
  modified_base 5: mod_base = OTHER; note = cytidine-3'-phosphate
  modified_base 6: mod_base = OTHER; note = adenosine-3'-phosphate
  modified_base 7: mod_base = OTHER; note = guanosine-3'-phosphate
  modified_base 8: mod_base = OTHER; note = cytidine-3'-phosphate
  modified_base 9: mod_base = OTHER; note = guanosine-3'-phosphate
  modified_base 10: mod_base = OTHER; note = guanosine-3'-phosphate
  modified_base 11: mod_base = OTHER; note = uridine-3'-phosphate
  modified_base 12: mod_base = OTHER; note = guanosine-3'-phosphate
  modified_base 13: mod_base = OTHER; note = uridine-3'-phosphate
  modified_base 14: mod_base = OTHER; note = guanosine-3'-phosphate
  modified_base 15: mod_base = OTHER; note = guanosine-3'-phosphate
  modified_base 16: mod_base = OTHER; note = adenosine-3'-phosphate
  modified_base 17: mod_base = OTHER; note = cytidine-3'-phosphate
  modified_base 18: mod_base = OTHER; note = uridine-3'-phosphate
  modified_base 19: mod_base = OTHER; note = cytidine-3'-phosphate
  misc_feature 1..19: note = RNA
  misc_feature 20..21: note = DNA
agctcagcggtgtggactctt

SEQ ID NO: 704 - DNA, 21 bp, synthetic construct
  source 1..21: mol_type = other DNA
  modified_base 1: mod_base = OTHER; note = guanosine-3'-phosphate
  modified_base 2: mod_base = OTHER; note = guanosine-3'-phosphate
  modified_base 3: mod_base = OTHER; note = cytidine-3'-phosphate
  modified_base 4: mod_base = OTHER; note = cytidine-3'-phosphate
  modified_base 5: mod_base = OTHER; note = uridine-3'-phosphate
  modified_base 6: mod_base = OTHER; note = guanosine-3'-phosphate
  modified_base 7: mod_base = OTHER; note = uridine-3'-phosphate
  modified_base 8: mod_base = OTHER; note = cytidine-3'-phosphate
  modified_base 9: mod_base = OTHER; note = adenosine-3'-phosphate
  modified_base 10: mod_base = OTHER; note = guanosine-3'-phosphate
  modified_base 11: mod_base = OTHER; note = uridine-3'-phosphate
  modified_base 12: mod_base = OTHER; note = uridine-3'-phosphate
  modified_base 13: mod_base = OTHER; note = cytidine-3'-phosphate
  modified_base 14: mod_base = OTHER; note = adenosine-3'-phosphate
  modified_base 15: mod_base = OTHER; note = guanosine-3'-phosphate
  modified_base 16: mod_base = OTHER; note = cytidine-3'-phosphate
  modified_base 17: mod_base = OTHER; note = uridine-3'-phosphate
  modified_base 18: mod_base = OTHER; note = cytidine-3'-phosphate
  modified_base 19: mod_base = OTHER; note = adenosine-3'-phosphate
  misc_feature 1..19: note = RNA
  misc_feature 20..21: note = DNA
ggcctgtcagttcagctcatt

SEQ ID NO: 705 - DNA, 21 bp, synthetic construct
  source 1..21: mol_type = other DNA
  modified_base 1: mod_base = OTHER; note = guanosine-3'-phosphate
  modified_base 2: mod_base = OTHER; note = cytidine-3'-phosphate
  modified_base 3: mod_base = OTHER; note = cytidine-3'-phosphate
  modified_base 4: mod_base = OTHER; note = cytidine-3'-phosphate
  modified_base 5: mod_base = OTHER; note = cytidine-3'-phosphate
  modified_base 6: mod_base = OTHER; note = cytidine-3'-phosphate
  modified_base 7: mod_base = OTHER; note = cytidine-3'-phosphate
  modified_base 8: mod_base = OTHER; note = adenosine-3'-phosphate
  modified_base 9: mod_base = OTHER; note = cytidine-3'-phosphate
  modified_base 10: mod_base = OTHER; note = uridine-3'-phosphate
  modified_base 11: mod_base = OTHER; note = guanosine-3'-phosphate
  modified_base 12: mod_base = OTHER; note = guanosine-3'-phosphate
  modified_base 13: mod_base = OTHER; note = cytidine-3'-phosphate
  modified_base 14: mod_base = OTHER; note = cytidine-3'-phosphate
  modified_base 15: mod_base = OTHER; note = uridine-3'-phosphate
  modified_base 16: mod_base = OTHER; note = guanosine-3'-phosphate
  modified_base 17: mod_base = OTHER; note = uridine-3'-phosphate
  modified_base 18: mod_base = OTHER; note = cytidine-3'-phosphate
  modified_base 19: mod_base = OTHER; note = adenosine-3'-phosphate
  misc_feature 1..19: note = RNA
  misc_feature 20..21: note = DNA
gccccccactggcctgtcatt

SEQ ID NO: 706 - DNA, 21 bp, synthetic construct
  source 1..21: mol_type = other DNA
  modified_base 1: mod_base = OTHER; note = guanosine-3'-phosphate
  modified_base 2: mod_base = OTHER; note = guanosine-3'-phosphate
  modified_base 3: mod_base = OTHER; note = cytidine-3'-phosphate
  modified_base 4: mod_base = OTHER; note = guanosine-3'-phosphate
  modified_base 5: mod_base = OTHER; note = cytidine-3'-phosphate
  modified_base 6: mod_base = OTHER; note = adenosine-3'-phosphate
  modified_base 7: mod_base = OTHER; note = cytidine-3'-phosphate
  modified_base 8: mod_base = OTHER; note = cytidine-3'-phosphate
  modified_base 9: mod_base = OTHER; note = cytidine-3'-phosphate
  modified_base 10: mod_base = OTHER; note = cytidine-3'-phosphate
  modified_base 11: mod_base = OTHER; note = uridine-3'-phosphate
  modified_base 12: mod_base = OTHER; note = guanosine-3'-phosphate
  modified_base 13: mod_base = OTHER; note = cytidine-3'-phosphate
  modified_base 14: mod_base = OTHER; note = cytidine-3'-phosphate
  modified_base 15: mod_base = OTHER; note = cytidine-3'-phosphate
  modified_base 16: mod_base = OTHER; note = cytidine-3'-phosphate
  modified_base 17: mod_base = OTHER; note = cytidine-3'-phosphate
  modified_base 18: mod_base = OTHER; note = cytidine-3'-phosphate
  modified_base 19: mod_base = OTHER; note = adenosine-3'-phosphate
  misc_feature 1..19: note = RNA
  misc_feature 20..21: note = DNA
ggcgcacccctgccccccatt

SEQ ID NO: 707 - DNA, 21 bp, synthetic construct
  source 1..21: mol_type = other DNA
  modified_base 1: mod_base = OTHER; note = adenosine-3'-phosphate
  modified_base 2: mod_base = OTHER; note = guanosine-3'-phosphate
  modified_base 3: mod_base = OTHER; note = guanosine-3'-phosphate
  modified_base 4: mod_base = OTHER; note = guanosine-3'-phosphate
  modified_base 5: mod_base = OTHER; note = cytidine-3'-phosphate
  modified_base 6: mod_base = OTHER; note = adenosine-3'-phosphate
  modified_base 7: mod_base = OTHER; note = guanosine-3'-phosphate
  modified_base 8: mod_base = OTHER; note = adenosine-3'-phosphate
  modified_base 9: mod_base = OTHER; note = guanosine-3'-phosphate
  modified_base 10: mod_base = OTHER; note = guanosine-3'-phosphate
  modified_base 11: mod_base = OTHER; note = adenosine-3'-phosphate
  modified_base 12: mod_base = OTHER; note = guanosine-3'-phosphate
  modified_base 13: mod_base = OTHER; note = guanosine-3'-phosphate
  modified_base 14: mod_base = OTHER; note = cytidine-3'-phosphate
  modified_base 15: mod_base = OTHER; note = guanosine-3'-phosphate
  modified_base 16: mod_base = OTHER; note = cytidine-3'-phosphate
  modified_base 17: mod_base = OTHER; note = adenosine-3'-phosphate
  modified_base 18: mod_base = OTHER; note = cytidine-3'-phosphate
  modified_base 19: mod_base = OTHER; note = cytidine-3'-phosphate
  misc_feature 1..19: note = RNA
  misc_feature 20..21: note = DNA
agggcagaggaggcgcacctt

SEQ ID NO: 708 - DNA, 21 bp, synthetic construct
  source 1..21: mol_type = other DNA
  modified_base 1: mod_base = OTHER; note = guanosine-3'-phosphate
  modified_base 2: mod_base = OTHER; note = guanosine-3'-phosphate
  modified_base 3: mod_base = OTHER; note = cytidine-3'-phosphate
  modified_base 4: mod_base = OTHER; note = uridine-3'-phosphate
  modified_base 5: mod_base = OTHER; note = guanosine-3'-phosphate
  modified_base 6: mod_base = OTHER; note = guanosine-3'-phosphate
  modified_base 7: mod_base = OTHER; note = uridine-3'-phosphate
  modified_base 8: mod_base = OTHER; note = guanosine-3'-phosphate
  modified_base 9: mod_base = OTHER; note = guanosine-3'-phosphate
  modified_base 10: mod_base = OTHER; note = guanosine-3'-phosphate
  modified_base 11: mod_base = OTHER; note = cytidine-3'-phosphate
  modified_base 12: mod_base = OTHER; note = adenosine-3'-phosphate
  modified_base 13: mod_base = OTHER; note = guanosine-3'-phosphate
  modified_base 14: mod_base = OTHER; note = guanosine-3'-phosphate
  modified_base 15: mod_base = OTHER; note = guanosine-3'-phosphate
  modified_base 16: mod_base = OTHER; note = cytidine-3'-phosphate
  modified_base 17: mod_base = OTHER; note = adenosine-3'-phosphate
  modified_base 18: mod_base = OTHER; note = guanosine-3'-phosphate
  modified_base 19: mod_base = OTHER; note = adenosine-3'-phosphate
  misc_feature 1..19: note = RNA
  misc_feature 20..21: note = DNA
ggctggtgggcagggcagatt

SEQ ID NO: 709 - DNA, 21 bp, synthetic construct
  source 1..21: mol_type = other DNA
  modified_base 1: mod_base = OTHER; note = cytidine-3'-phosphate
  modified_base 2: mod_base = OTHER; note = adenosine-3'-phosphate
  modified_base 3: mod_base = OTHER; note = uridine-3'-phosphate
  modified_base 4: mod_base = OTHER; note = cytidine-3'-phosphate
  modified_base 5: mod_base = OTHER; note = adenosine-3'-phosphate
  modified_base 6: mod_base = OTHER; note = adenosine-3'-phosphate
  modified_base 7: mod_base = OTHER; note = adenosine-3'-phosphate
  modified_base 8: mod_base = OTHER; note = uridine-3'-phosphate
  modified_base 9: mod_base = OTHER; note = cytidine-3'-phosphate
  modified_base 10: mod_base = OTHER; note = adenosine-3'-phosphate
  modified_base 11: mod_base = OTHER; note = cytidine-3'-phosphate
  modified_base 12: mod_base = OTHER; note = adenosine-3'-phosphate
  modified_base 13: mod_base = OTHER; note = guanosine-3'-phosphate
  modified_base 14: mod_base = OTHER; note = guanosine-3'-phosphate
  modified_base 15: mod_base = OTHER; note = cytidine-3'-phosphate
  modified_base 16: mod_base = OTHER; note = uridine-3'-phosphate
  modified_base 17: mod_base = OTHER; note = guanosine-3'-phosphate
  modified_base 18: mod_base = OTHER; note = guanosine-3'-phosphate
  modified_base 19: mod_base = OTHER; note = uridine-3'-phosphate
  misc_feature 1..19: note = RNA
  misc_feature 20..21: note = DNA
catcaaatcacaggctggttt

SEQ ID NO: 710 - DNA, 21 bp, synthetic construct
  source 1..21: mol_type = other DNA
  modified_base 1: mod_base = OTHER; note = uridine-3'-phosphate
  modified_base 2: mod_base = OTHER; note = guanosine-3'-phosphate
  modified_base 3: mod_base = OTHER; note = adenosine-3'-phosphate
  modified_base 4: mod_base = OTHER; note = adenosine-3'-phosphate
  modified_base 5: mod_base = OTHER; note = guanosine-3'-phosphate
  modified_base 6: mod_base = OTHER; note = adenosine-3'-phosphate
  modified_base 7: mod_base = OTHER; note = cytidine-3'-phosphate
  modified_base 8: mod_base = OTHER; note = cytidine-3'-phosphate
  modified_base 9: mod_base = OTHER; note = cytidine-3'-phosphate
  modified_base 10: mod_base = OTHER; note = cytidine-3'-phosphate
  modified_base 11: mod_base = OTHER; note = adenosine-3'-phosphate
  modified_base 12: mod_base = OTHER; note = uridine-3'-phosphate
  modified_base 13: mod_base = OTHER; note = cytidine-3'-phosphate
  modified_base 14: mod_base = OTHER; note = adenosine-3'-phosphate
  modified_base 15: mod_base = OTHER; note = adenosine-3'-phosphate
  modified_base 16: mod_base = OTHER; note = adenosine-3'-phosphate
  modified_base 17: mod_base = OTHER; note = uridine-3'-phosphate
  modified_base 18: mod_base = OTHER; note = cytidine-3'-phosphate
  modified_base 19: mod_base = OTHER; note = adenosine-3'-phosphate
  misc_feature 1..19: note = RNA
  misc_feature 20..21: note = DNA
tgaagaccccatcaaatcatt

SEQ ID NO: 711 - DNA, 21 bp, synthetic construct
  source 1..21: mol_type = other DNA
  modified_base 1: mod_base = OTHER; note = adenosine-3'-phosphate
  modified_base 2: mod_base = OTHER; note = uridine-3'-phosphate
  modified_base 3: mod_base = OTHER; note = uridine-3'-phosphate
  modified_base 4: mod_base = OTHER; note = uridine-3'-phosphate
  modified_base 5: mod_base = OTHER; note = cytidine-3'-phosphate
  modified_base 6: mod_base = OTHER; note = uridine-3'-phosphate
  modified_base 7: mod_base = OTHER; note = guanosine-3'-phosphate
  modified_base 8: mod_base = OTHER; note = guanosine-3'-phosphate
  modified_base 9: mod_base = OTHER; note = adenosine-3'-phosphate
  modified_base 10: mod_base = OTHER; note = cytidine-3'-phosphate
  modified_base 11: mod_base = OTHER; note = adenosine-3'-phosphate
  modified_base 12: mod_base = OTHER; note = adenosine-3'-phosphate
  modified_base 13: mod_base = OTHER; note = uridine-3'-phosphate
  modified_base 14: mod_base = OTHER; note = guanosine-3'-phosphate
  modified_base 15: mod_base = OTHER; note = adenosine-3'-phosphate
  modified_base 16: mod_base = OTHER; note = adenosine-3'-phosphate
  modified_base 17: mod_base = OTHER; note = guanosine-3'-phosphate
  modified_base 18: mod_base = OTHER; note = adenosine-3'-phosphate
  modified_base 19: mod_base = OTHER; note = cytidine-3'-phosphate
  misc_feature 1..19: note = RNA
  misc_feature 20..21: note = DNA
atttctggacaatgaagactt

SEQ ID NO: 712 - DNA, 21 bp, synthetic construct
  source 1..21: mol_type = other DNA
  modified_base 1: mod_base = OTHER; note = guanosine-3'-phosphate
  modified_base 2: mod_base = OTHER; note = guanosine-3'-phosphate
  modified_base 3: mod_base = OTHER; note = guanosine-3'-phosphate
  modified_base 4: mod_base = OTHER; note = adenosine-3'-phosphate
  modified_base 5: mod_base = OTHER; note = guanosine-3'-phosphate
  modified_base 6: mod_base = OTHER; note = guanosine-3'-phosphate
  modified_base 7: mod_base = OTHER; note = adenosine-3'-phosphate
  modified_base 8: mod_base = OTHER; note = guanosine-3'-phosphate
  modified_base 9: mod_base = OTHER; note = guanosine-3'-phosphate
  modified_base 10: mod_base = OTHER; note = uridine-3'-phosphate
  modified_base 11: mod_base = OTHER; note = adenosine-3'-phosphate
  modified_base 12: mod_base = OTHER; note = uridine-3'-phosphate
  modified_base 13: mod_base = OTHER; note = uridine-3'-phosphate
  modified_base 14: mod_base = OTHER; note = uridine-3'-phosphate
  modified_base 15: mod_base = OTHER; note = cytidine-3'-phosphate
  modified_base 16: mod_base = OTHER; note = uridine-3'-phosphate
  modified_base 17: mod_base = OTHER; note = guanosine-3'-phosphate
  modified_base 18: mod_base = OTHER; note = guanosine-3'-phosphate
  modified_base 19: mod_base = OTHER; note = adenosine-3'-phosphate
  misc_feature 1..19: note = RNA
  misc_feature 20..21: note = DNA
gggaggaggtatttctggatt

SEQ ID NO: 713 - DNA, 21 bp, synthetic construct
  source 1..21: mol_type = other DNA
  modified_base 1: mod_base = OTHER; note = guanosine-3'-phosphate
  modified_base 2: mod_base = OTHER; note = guanosine-3'-phosphate
  modified_base 3: mod_base = OTHER; note = guanosine-3'-phosphate
  modified_base 4: mod_base = OTHER; note = guanosine-3'-phosphate
  modified_base 5: mod_base = OTHER; note = cytidine-3'-phosphate
  modified_base 6: mod_base = OTHER; note = adenosine-3'-phosphate
  modified_base 7: mod_base = OTHER; note = guanosine-3'-phosphate
  modified_base 8: mod_base = OTHER; note = uridine-3'-phosphate
  modified_base 9: mod_base = OTHER; note = cytidine-3'-phosphate
  modified_base 10: mod_base = OTHER; note = adenosine-3'-phosphate
  modified_base 11: mod_base = OTHER; note = guanosine-3'-phosphate
  modified_base 12: mod_base = OTHER; note = cytidine-3'-phosphate
  modified_base 13: mod_base = OTHER; note = guanosine-3'-phosphate
  modified_base 14: mod_base = OTHER; note = guanosine-3'-phosphate
  modified_base 15: mod_base = OTHER; note = guanosine-3'-phosphate
  modified_base 16: mod_base = OTHER; note = adenosine-3'-phosphate
  modified_base 17: mod_base = OTHER; note = guanosine-3'-phosphate
  modified_base 18: mod_base = OTHER; note = guanosine-3'-phosphate
  modified_base 19: mod_base = OTHER; note = adenosine-3'-phosphate
  misc_feature 1..19: note = RNA
  misc_feature 20..21: note = DNA
ggggcagtcagcgggaggatt

SEQ ID NO: 714 - DNA, 21 bp, synthetic construct
  source 1..21: mol_type = other DNA
  modified_base 1: mod_base = OTHER; note = uridine-3'-phosphate
  modified_base 2: mod_base = OTHER; note = uridine-3'-phosphate
  modified_base 3: mod_base = OTHER; note = uridine-3'-phosphate
  modified_base 4: mod_base = OTHER; note = cytidine-3'-phosphate
  modified_base 5: mod_base = OTHER; note = adenosine-3'-phosphate
  modified_base 6: mod_base = OTHER; note = guanosine-3'-phosphate
  modified_base 7: mod_base = OTHER; note = guanosine-3'-phosphate
  modified_base 8: mod_base = OTHER; note = cytidine-3'-phosphate
  modified_base 9: mod_base = OTHER; note = uridine-3'-phosphate
  modified_base 10: mod_base = OTHER; note = cytidine-3'-phosphate
  modified_base 11: mod_base = OTHER; note = uridine-3'-phosphate
  modified_base 12: mod_base = OTHER; note = guanosine-3'-phosphate
  modified_base 13: mod_base = OTHER; note = guanosine-3'-phosphate
  modified_base 14: mod_base = OTHER; note = guanosine-3'-phosphate
  modified_base 15: mod_base = OTHER; note = guanosine-3'-phosphate
  modified_base 16: mod_base = OTHER; note = cytidine-3'-phosphate
  modified_base 17: mod_base = OTHER; note = adenosine-3'-phosphate
  modified_base 18: mod_base = OTHER; note = guanosine-3'-phosphate
  modified_base 19: mod_base = OTHER; note = uridine-3'-phosphate
  misc_feature 1..19: note = RNA
  misc_feature 20..21: note = DNA
tttcaggctctggggcagttt

SEQ ID NO: 715 - DNA, 21 bp, synthetic construct
  source 1..21: mol_type = other DNA
  modified_base 1: mod_base = OTHER; note = adenosine-3'-phosphate
  modified_base 2: mod_base = OTHER; note = guanosine-3'-phosphate
  modified_base 3: mod_base = OTHER; note = guanosine-3'-phosphate
  modified_base 4: mod_base = OTHER; note = guanosine-3'-phosphate
  modified_base 5: mod_base = OTHER; note = uridine-3'-phosphate
  modified_base 6: mod_base = OTHER; note = guanosine-3'-phosphate
  modified_base 7: mod_base = OTHER; note = adenosine-3'-phosphate
  modified_base 8: mod_base = OTHER; note = guanosine-3'-phosphate
  modified_base 9: mod_base = OTHER; note = adenosine-3'-phosphate
  modified_base 10: mod_base = OTHER; note = cytidine-3'-phosphate
  modified_base 11: mod_base = OTHER; note = uridine-3'-phosphate
  modified_base 12: mod_base = OTHER; note = uridine-3'-phosphate
  modified_base 13: mod_base = OTHER; note = uridine-3'-phosphate
  modified_base 14: mod_base = OTHER; note = cytidine-3'-phosphate
  modified_base 15: mod_base = OTHER; note = adenosine-3'-phosphate
  modified_base 16: mod_base = OTHER; note = guanosine-3'-phosphate
  modified_base 17: mod_base = OTHER; note = guanosine-3'-phosphate
  modified_base 18: mod_base = OTHER; note = cytidine-3'-phosphate
  modified_base 19: mod_base = OTHER; note = uridine-3'-phosphate
  misc_feature 1..19: note = RNA
  misc_feature 20..21: note = DNA
agggtgagactttcaggcttt

SEQ ID NO: 716 - DNA, 21 bp, synthetic construct
  source 1..21: mol_type = other DNA
  modified_base 1: mod_base = OTHER; note = adenosine-3'-phosphate
  modified_base 2: mod_base = OTHER; note = guanosine-3'-phosphate
  modified_base 3: mod_base = OTHER; note = guanosine-3'-phosphate
  modified_base 4: mod_base = OTHER; note = uridine-3'-phosphate
  modified_base 5: mod_base = OTHER; note = guanosine-3'-phosphate
  modified_base 6: mod_base = OTHER; note = guanosine-3'-phosphate
  modified_base 7: mod_base = OTHER; note = guanosine-3'-phosphate
  modified_base 8: mod_base = OTHER; note = cytidine-3'-phosphate
  modified_base 9: mod_base = OTHER; note = uridine-3'-phosphate
  modified_base 10: mod_base = OTHER; note = cytidine-3'-phosphate
  modified_base 11: mod_base = OTHER; note = cytidine-3'-phosphate
  modified_base 12: mod_base = OTHER; note = adenosine-3'-phosphate
  modified_base 13: mod_base = OTHER; note = adenosine-3'-phosphate
  modified_base 14: mod_base = OTHER; note = guanosine-3'-phosphate
  modified_base 15: mod_base = OTHER; note = guanosine-3'-phosphate
  modified_base 16: mod_base = OTHER; note = guanosine-3'-phosphate
  modified_base 17: mod_base = OTHER; note = uridine-3'-phosphate
  modified_base 18: mod_base = OTHER; note = guanosine-3'-phosphate
  modified_base 19: mod_base = OTHER; note = adenosine-3'-phosphate
  misc_feature 1..19: note = RNA
  misc_feature 20..21: note = DNA
aggtgggctccaagggtgatt

SEQ ID NO: 717 - DNA, 21 bp, synthetic construct
  source 1..21: mol_type = other DNA
  modified_base 1: mod_base = OTHER; note = cytidine-3'-phosphate
  modified_base 2: mod_base = OTHER; note = cytidine-3'-phosphate
  modified_base 3: mod_base = OTHER; note = cytidine-3'-phosphate
  modified_base 4: mod_base = OTHER; note = uridine-3'-phosphate
  modified_base 5: mod_base = OTHER; note = uridine-3'-phosphate
  modified_base 6: mod_base = OTHER; note = adenosine-3'-phosphate
  modified_base 7: mod_base = OTHER; note = adenosine-3'-phosphate
  modified_base 8: mod_base = OTHER; note = uridine-3'-phosphate
  modified_base 9: mod_base = OTHER; note = uridine-3'-phosphate
  modified_base 10: mod_base = OTHER; note = cytidine-3'-phosphate
  modified_base 11: mod_base = OTHER; note = cytidine-3'-phosphate
  modified_base 12: mod_base = OTHER; note = adenosine-3'-phosphate
  modified_base 13: mod_base = OTHER; note = adenosine-3'-phosphate
  modified_base 14: mod_base = OTHER; note = guanosine-3'-phosphate
  modified_base 15: mod_base = OTHER; note = guanosine-3'-phosphate
  modified_base 16: mod_base = OTHER; note = uridine-3'-phosphate
  modified_base 17: mod_base = OTHER; note = guanosine-3'-phosphate
  modified_base 18: mod_base = OTHER; note = guanosine-3'-phosphate
  modified_base 19: mod_base = OTHER; note = guanosine-3'-phosphate
  misc_feature 1..19: note = RNA
  misc_feature 20..21: note = DNA
cccttaattccaaggtgggtt

SEQ ID NO: 718 - DNA, 21 bp, synthetic construct
  source 1..21: mol_type = other DNA
  modified_base 1: mod_base = OTHER; note = uridine-3'-phosphate
  modified_base 2: mod_base = OTHER; note = guanosine-3'-phosphate
  modified_base 3: mod_base = OTHER; note = adenosine-3'-phosphate
  modified_base 4: mod_base = OTHER; note = guanosine-3'-phosphate
  modified_base 5: mod_base = OTHER; note = guanosine-3'-phosphate
  modified_base 6: mod_base = OTHER; note = cytidine-3'-phosphate
  modified_base 7: mod_base = OTHER; note = adenosine-3'-phosphate
  modified_base 8: mod_base = OTHER; note = cytidine-3'-phosphate
  modified_base 9: mod_base = OTHER; note = guanosine-3'-phosphate
  modified_base 10: mod_base = OTHER; note = cytidine-3'-phosphate
  modified_base 11: mod_base = OTHER; note = cytidine-3'-phosphate
  modified_base 12: mod_base = OTHER; note = cytidine-3'-phosphate
  modified_base 13: mod_base = OTHER; note = uridine-3'-phosphate
  modified_base 14: mod_base = OTHER; note = uridine-3'-phosphate
  modified_base 15: mod_base = OTHER; note = adenosine-3'-phosphate
  modified_base 16: mod_base = OTHER; note = adenosine-3'-phosphate
  modified_base 17: mod_base = OTHER; note = uridine-3'-phosphate
  modified_base 18: mod_base = OTHER; note = uridine-3'-phosphate
  modified_base 19: mod_base = OTHER; note = cytidine-3'-phosphate
  misc_feature 1..19: note = RNA
  misc_feature 20..21: note = DNA
tgaggcacgcccttaattctt

SEQ ID NO: 719 - DNA, 21 bp, synthetic construct
  source 1..21: mol_type = other DNA
  modified_base 1: mod_base = OTHER; note = cytidine-3'-phosphate
  modified_base 2: mod_base = OTHER; note = adenosine-3'-phosphate
  modified_base 3: mod_base = OTHER; note = cytidine-3'-phosphate
  modified_base 4: mod_base = OTHER; note = adenosine-3'-phosphate
  modified_base 5: mod_base = OTHER; note = uridine-3'-phosphate
  modified_base 6: mod_base = OTHER; note = uridine-3'-phosphate
  modified_base 7: mod_base = OTHER; note = uridine-3'-phosphate
  modified_base 8: mod_base = OTHER; note = guanosine-3'-phosphate
  modified_base 9: mod_base = OTHER; note = uridine-3'-phosphate
  modified_base 10: mod_base = OTHER; note = guanosine-3'-phosphate
  modified_base 11: mod_base = OTHER; note = guanosine-3'-phosphate
  modified_base 12: mod_base = OTHER; note = cytidine-3'-phosphate
  modified_base 13: mod_base = OTHER; note = uridine-3'-phosphate
  modified_base 14: mod_base = OTHER; note = guanosine-3'-phosphate
  modified_base 15: mod_base = OTHER; note = adenosine-3'-phosphate
  modified_base 16: mod_base = OTHER; note = guanosine-3'-phosphate
  modified_base 17: mod_base = OTHER; note = guanosine-3'-phosphate
  modified_base 18: mod_base = OTHER; note = cytidine-3'-phosphate
  modified_base 19: mod_base = OTHER; note = adenosine-3'-phosphate
  misc_feature 1..19: note = RNA
  misc_feature 20..21: note = DNA
cacatttgtggctgaggcatt

SEQ ID NO: 720 - DNA, 21 bp, synthetic construct
  source 1..21: mol_type = other DNA
  modified_base 1: mod_base = OTHER; note = uridine-3'-phosphate
  modified_base 2: mod_base = OTHER; note = adenosine-3'-phosphate
  modified_base 3: mod_base = OTHER; note = uridine-3'-phosphate
  modified_base 4: mod_base = OTHER; note = cytidine-3'-phosphate
  modified_base 5: mod_base = OTHER; note = cytidine-3'-phosphate
  modified_base 6: mod_base = OTHER; note = uridine-3'-phosphate
  modified_base 7: mod_base = OTHER; note = guanosine-3'-phosphate
  modified_base 8: mod_base = OTHER; note = guanosine-3'-phosphate
  modified_base 9: mod_base = OTHER; note = guanosine-3'-phosphate
  modified_base 10: mod_base = OTHER; note = uridine-3'-phosphate
  modified_base 11: mod_base = OTHER; note = cytidine-3'-phosphate
  modified_base 12: mod_base = OTHER; note = adenosine-3'-phosphate
  modified_base 13: mod_base = OTHER; note = cytidine-3'-phosphate
  modified_base 14: mod_base = OTHER; note = adenosine-3'-phosphate
  modified_base 15: mod_base = OTHER; note = uridine-3'-phosphate
  modified_base 16: mod_base = OTHER; note = uridine-3'-phosphate
  modified_base 17: mod_base = OTHER; note = uridine-3'-phosphate
  modified_base 18: mod_base = OTHER; note = guanosine-3'-phosphate
  modified_base 19: mod_base = OTHER; note = uridine-3'-phosphate
  misc_feature 1..19: note = RNA
  misc_feature 20..21: note = DNA
tatcctgggtcacatttgttt

SEQ ID NO: 721 - DNA, 21 bp, synthetic construct
  source 1..21: mol_type = other DNA
  modified_base 1: mod_base = OTHER; note = adenosine-3'-phosphate
  modified_base 2: mod_base = OTHER; note = guanosine-3'-phosphate
  modified_base 3: mod_base = OTHER; note = cytidine-3'-phosphate
  modified_base 4: mod_base = OTHER; note = adenosine-3'-phosphate
  modified_base 5: mod_base = OTHER; note = adenosine-3'-phosphate
  modified_base 6: mod_base = OTHER; note = cytidine-3'-phosphate
  modified_base 7: mod_base = OTHER; note = adenosine-3'-phosphate
  modified_base 8: mod_base = OTHER; note = cytidine-3'-phosphate
  modified_base 9: mod_base = OTHER; note = uridine-3'-phosphate
  modified_base 10: mod_base = OTHER; note = cytidine-3'-phosphate
  modified_base 11: mod_base = OTHER; note = uridine-3'-phosphate
  modified_base 12: mod_base = OTHER; note = guanosine-3'-phosphate
  modified_base 13: mod_base = OTHER; note = uridine-3'-phosphate
  modified_base 14: mod_base = OTHER; note = adenosine-3'-phosphate
  modified_base 15: mod_base = OTHER; note = uridine-3'-phosphate
  modified_base 16: mod_base = OTHER; note = cytidine-3'-phosphate
  modified_base 17: mod_base = OTHER; note = cytidine-3'-phosphate
  modified_base 18: mod_base = OTHER; note = uridine-3'-phosphate
  modified_base 19: mod_base = OTHER; note = guanosine-3'-phosphate
  misc_feature 1..19: note = RNA
  misc_feature 20..21: note = DNA
agcaacactctgtatcctgtt

SEQ ID NO: 722 - DNA, 21 bp, synthetic construct
  source 1..21: mol_type = other DNA
  modified_base 1: mod_base = OTHER; note = cytidine-3'-phosphate
  modified_base 2: mod_base = OTHER; note = cytidine-3'-phosphate
  modified_base 3: mod_base = OTHER; note = cytidine-3'-phosphate
  modified_base 4: mod_base = OTHER; note = uridine-3'-phosphate
  modified_base 5: mod_base = OTHER; note = guanosine-3'-phosphate
  modified_base 6: mod_base = OTHER; note = adenosine-3'-phosphate
  modified_base 7: mod_base = OTHER; note = guanosine-3'-phosphate
  modified_base 8: mod_base = OTHER; note = guanosine-3'-phosphate
  modified_base 9: mod_base = OTHER; note = adenosine-3'-phosphate
  modified_base 10: mod_base = OTHER; note = cytidine-3'-phosphate
  modified_base 11: mod_base = OTHER; note = adenosine-3'-phosphate
  modified_base 12: mod_base = OTHER; note = guanosine-3'-phosphate
  modified_base 13: mod_base = OTHER; note = cytidine-3'-phosphate
  modified_base 14: mod_base = OTHER; note = adenosine-3'-phosphate
  modified_base 15: mod_base = OTHER; note = adenosine-3'-phosphate
  modified_base 16: mod_base = OTHER; note = cytidine-3'-phosphate
  modified_base 17: mod_base = OTHER; note = adenosine-3'-phosphate
  modified_base 18: mod_base = OTHER; note = cytidine-3'-phosphate
  modified_base 19: mod_base = OTHER; note = uridine-3'-phosphate
  misc_feature 1..19: note = RNA
  misc_feature 20..21: note = DNA
ccctgaggacagcaacacttt

SEQ ID NO: 723 - DNA, 21 bp, synthetic construct
  source 1..21: mol_type = other DNA
  modified_base 1: mod_base = OTHER; note = adenosine-3'-phosphate
  modified_base 2: mod_base = OTHER; note = guanosine-3'-phosphate
  modified_base 3: mod_base = OTHER; note = adenosine-3'-phosphate
  modified_base 4: mod_base = OTHER; note = uridine-3'-phosphate
  modified_base 5: mod_base = OTHER; note = cytidine-3'-phosphate
  modified_base 6: mod_base = OTHER; note = guanosine-3'-phosphate
  modified_base 7: mod_base = OTHER; note = guanosine-3'-phosphate
  modified_base 8: mod_base = OTHER; note = adenosine-3'-phosphate
  modified_base 9: mod_base = OTHER; note = cytidine-3'-phosphate
  modified_base 10: mod_base = OTHER; note = cytidine-3'-phosphate
  modified_base 11: mod_base = OTHER; note = uridine-3'-phosphate
  modified_base 12: mod_base = OTHER; note = cytidine-3'-phosphate
  modified_base 13: mod_base = OTHER; note = cytidine-3'-phosphate
  modified_base 14: mod_base = OTHER; note = cytidine-3'-phosphate
  modified_base 15: mod_base = OTHER; note = uridine-3'-phosphate
  modified_base 16: mod_base = OTHER; note = guanosine-3'-phosphate
  modified_base 17: mod_base = OTHER; note = adenosine-3'-phosphate
  modified_base 18: mod_base = OTHER; note = guanosine-3'-phosphate
  modified_base 19: mod_base = OTHER; note = guanosine-3'-phosphate
  misc_feature 1..19: note = RNA
  misc_feature 20..21: note = DNA
agatcggacctccctgaggtt

SEQ ID NO: 724 - DNA, 21 bp, synthetic construct
  source 1..21: mol_type = other DNA
  modified_base 1: mod_base = OTHER; note = adenosine-3'-phosphate
  modified_base 2: mod_base = OTHER; note = uridine-3'-phosphate
  modified_base 3: mod_base = OTHER; note = adenosine-3'-phosphate
  modified_base 4: mod_base = OTHER; note = uridine-3'-phosphate
  modified_base 5: mod_base = OTHER; note = guanosine-3'-phosphate
  modified_base 6: mod_base = OTHER; note = uridine-3'-phosphate
  modified_base 7: mod_base = OTHER; note = guanosine-3'-phosphate
  modified_base 8: mod_base = OTHER; note = uridine-3'-phosphate
  modified_base 9: mod_base = OTHER; note = uridine-3'-phosphate
  modified_base 10: mod_base = OTHER; note = cytidine-3'-phosphate
  modified_base 11: mod_base = OTHER; note = cytidine-3'-phosphate
  modified_base 12: mod_base = OTHER; note = adenosine-3'-phosphate
  modified_base 13: mod_base = OTHER; note = guanosine-3'-phosphate
  modified_base 14: mod_base = OTHER; note = adenosine-3'-phosphate
  modified_base 15: mod_base = OTHER; note = uridine-3'-phosphate
  modified_base 16: mod_base = OTHER; note = cytidine-3'-phosphate
  modified_base 17: mod_base = OTHER; note = guanosine-3'-phosphate
  modified_base 18: mod_base = OTHER; note = guanosine-3'-phosphate
  modified_base 19: mod_base = OTHER; note = adenosine-3'-phosphate
  misc_feature 1..19: note = RNA
  misc_feature 20..21: note = DNA
atatgtgttccagatcggatt

SEQ ID NO: 725 - DNA, 21 bp, synthetic construct
  source 1..21: mol_type = other DNA
  modified_base 1: mod_base = OTHER; note = cytidine-3'-phosphate
  modified_base 2: mod_base = OTHER; note = cytidine-3'-phosphate
  modified_base 3: mod_base = OTHER; note = cytidine-3'-phosphate
  modified_base 4: mod_base = OTHER; note = cytidine-3'-phosphate
  modified_base 5: mod_base = OTHER; note = adenosine-3'-phosphate
  modified_base 6: mod_base = OTHER; note = adenosine-3'-phosphate
  modified_base 7: mod_base = OTHER; note = uridine-3'-phosphate
  modified_base 8: mod_base = OTHER; note = uridine-3'-phosphate
  modified_base 9: mod_base = OTHER; note = cytidine-3'-phosphate
  modified_base 10: mod_base = OTHER; note = cytidine-3'-phosphate
  modified_base 11: mod_base = OTHER; note = adenosine-3'-phosphate
  modified_base 12: mod_base = OTHER; note = adenosine-3'-phosphate
  modified_base 13: mod_base = OTHER; note = uridine-3'-phosphate
  modified_base 14: mod_base = OTHER; note = adenosine-3'-phosphate
  modified_base 15: mod_base = OTHER; note = uridine-3'-phosphate
  modified_base 16: mod_base = OTHER; note = guanosine-3'-phosphate
  modified_base 17: mod_base = OTHER; note = uridine-3'-phosphate
  modified_base 18: mod_base = OTHER; note = guanosine-3'-phosphate
  modified_base 19: mod_base = OTHER; note = uridine-3'-phosphate
  misc_feature 1..19: note = RNA
  misc_feature 20..21: note = DNA
ccccaattccaatatgtgttt

SEQ ID NO: 726 - DNA, 21 bp, synthetic construct
  source 1..21: mol_type = other DNA
  modified_base 1: mod_base = OTHER; note = adenosine-3'-phosphate
  modified_base 2: mod_base = OTHER; note = uridine-3'-phosphate
  modified_base 3: mod_base = OTHER; note = adenosine-3'-phosphate
  modified_base 4: mod_base = OTHER; note = uridine-3'-phosphate
  modified_base 5: mod_base = OTHER; note = uridine-3'-phosphate
  modified_base 6: mod_base = OTHER; note = guanosine-3'-phosphate
  modified_base 7: mod_base = OTHER; note = guanosine-3'-phosphate
  modified_base 8: mod_base = OTHER; note = adenosine-3'-phosphate
  modified_base 9: mod_base = OTHER; note = guanosine-3'-phosphate
  modified_base 10: mod_base = OTHER; note = uridine-3'-phosphate
  modified_base 11: mod_base = OTHER; note = uridine-3'-phosphate
  modified_base 12: mod_base = OTHER; note = guanosine-3'-phosphate
  modified_base 13: mod_base = OTHER; note = guanosine-3'-phosphate
  modified_base 14: mod_base = OTHER; note = cytidine-3'-phosphate
  modified_base 15: mod_base = OTHER; note = cytidine-3'-phosphate
  modified_base 16: mod_base = OTHER; note = cytidine-3'-phosphate
  modified_base 17: mod_base = OTHER; note = cytidine-3'-phosphate
  modified_base 18: mod_base = OTHER; note = adenosine-3'-phosphate
  modified_base 19: mod_base = OTHER; note = adenosine-3'-phosphate
  misc_feature 1..19: note = RNA
  misc_feature 20..21: note = DNA
atattggagttggccccaatt

SEQ ID NO: 727 - DNA, 21 bp, synthetic construct
  source 1..21: mol_type = other DNA
  modified_base 1: mod_base = OTHER; note = adenosine-3'-phosphate
  modified_base 2: mod_base = OTHER; note = cytidine-3'-phosphate
  modified_base 3: mod_base = OTHER; note = cytidine-3'-phosphate
  modified_base 4: mod_base = OTHER; note = cytidine-3'-phosphate
  modified_base 5: mod_base = OTHER; note = adenosine-3'-phosphate
  modified_base 6: mod_base = OTHER; note = cytidine-3'-phosphate
  modified_base 7: mod_base = OTHER; note = cytidine-3'-phosphate
  modified_base 8: mod_base = OTHER; note = cytidine-3'-phosphate
  modified_base 9: mod_base = OTHER; note = uridine-3'-phosphate
  modified_base 10: mod_base = OTHER; note = adenosine-3'-phosphate
  modified_base 11: mod_base = OTHER; note = uridine-3'-phosphate
  modified_base 12: mod_base = OTHER; note = adenosine-3'-phosphate
  modified_base 13: mod_base = OTHER; note = uridine-3'-phosphate
  modified_base 14: mod_base = OTHER; note = uridine-3'-phosphate
  modified_base 15: mod_base = OTHER; note = guanosine-3'-phosphate
  modified_base 16: mod_base = OTHER; note = guanosine-3'-phosphate
  modified_base 17: mod_base = OTHER; note = adenosine-3'-phosphate
  modified_base 18: mod_base = OTHER; note = guanosine-3'-phosphate
  modified_base 19: mod_base = OTHER; note = uridine-3'-phosphate
  misc_feature 1..19: note = RNA
  misc_feature 20..21: note = DNA
acccaccctatattggagttt

SEQ ID NO: 728 - DNA, 21 bp, synthetic construct
  source 1..21: mol_type = other DNA
  modified_base 1: mod_base = OTHER; note = adenosine-3'-phosphate
  modified_base 2: mod_base = OTHER; note = uridine-3'-phosphate
  modified_base 3: mod_base = OTHER; note = uridine-3'-phosphate
  modified_base 4: mod_base = OTHER; note = adenosine-3'-phosphate
  modified_base 5: mod_base = OTHER; note = uridine-3'-phosphate
  modified_base 6: mod_base = OTHER; note = adenosine-3'-phosphate
  modified_base 7: mod_base = OTHER; note = adenosine-3'-phosphate
  modified_base 8: mod_base = OTHER; note = guanosine-3'-phosphate
  modified_base 9: mod_base = OTHER; note = guanosine-3'-phosphate
  modified_base 10: mod_base = OTHER; note = cytidine-3'-phosphate
  modified_base 11: mod_base = OTHER; note = cytidine-3'-phosphate
  modified_base 12: mod_base = OTHER; note = uridine-3'-phosphate
  modified_base 13: mod_base = OTHER; note = uridine-3'-phosphate
  modified_base 14: mod_base = OTHER; note = adenosine-3'-phosphate
  modified_base 15: mod_base = OTHER; note = cytidine-3'-phosphate
  modified_base 16: mod_base = OTHER; note = cytidine-3'-phosphate
  modified_base 17: mod_base = OTHER; note = cytidine-3'-phosphate
  modified_base 18: mod_base = OTHER; note = adenosine-3'-phosphate
  modified_base 19: mod_base = OTHER; note = cytidine-3'-phosphate
  misc_feature 1..19: note = RNA
  misc_feature 20..21: note = DNA
attataaggccttacccactt

SEQ ID NO: 729 - DNA, 21 bp, synthetic construct
  source 1..21: mol_type = other DNA
  modified_base 1: mod_base = OTHER; note = uridine-3'-phosphate
  modified_base 2: mod_base = OTHER; note = guanosine-3'-phosphate
  modified_base 3: mod_base = OTHER; note = cytidine-3'-phosphate
  modified_base 4: mod_base = OTHER; note = uridine-3'-phosphate
  modified_base 5: mod_base = OTHER; note = cytidine-3'-phosphate
  modified_base 6: mod_base = OTHER; note = uridine-3'-phosphate
  modified_base 7: mod_base = OTHER; note = uridine-3'-phosphate
  modified_base 8: mod_base = OTHER; note = uridine-3'-phosphate
  modified_base 9: mod_base = OTHER; note = adenosine-3'-phosphate
  modified_base 10: mod_base = OTHER; note = cytidine-3'-phosphate
  modified_base 11: mod_base = OTHER; note = adenosine-3'-phosphate
  modified_base 12: mod_base = OTHER; note = uridine-3'-phosphate
  modified_base 13: mod_base = OTHER; note = uridine-3'-phosphate
  modified_base 14: mod_base = OTHER; note = adenosine-3'-phosphate
  modified_base 15: mod_base = OTHER; note = uridine-3'-phosphate
  modified_base 16: mod_base = OTHER; note = adenosine-3'-phosphate
  modified_base 17: mod_base = OTHER; note = adenosine-3'-phosphate
  modified_base 18: mod_base = OTHER; note = guanosine-3'-phosphate
  modified_base 19: mod_base = OTHER; note = guanosine-3'-phosphate
  misc_feature 1..19: note = RNA
  misc_feature 20..21: note = DNA
tgctctttacattataaggtt

SEQ ID NO: 730 - DNA, 21 bp, synthetic construct
  source 1..21: mol_type = other DNA
  modified_base 1: mod_base = OTHER; note = cytidine-3'-phosphate
  modified_base 2: mod_base = OTHER; note = uridine-3'-phosphate
  modified_base 3: mod_base = OTHER; note = uridine-3'-phosphate
  modified_base 4: mod_base = OTHER; note = uridine-3'-phosphate
  modified_base 5: mod_base = OTHER; note = adenosine-3'-phosphate
  modified_base 6: mod_base = OTHER; note = cytidine-3'-phosphate
  modified_base 7: mod_base = OTHER; note = adenosine-3'-phosphate
  modified_base 8: mod_base = OTHER; note = uridine-3'-phosphate
  modified_base 9: mod_base = OTHER; note = uridine-3'-phosphate
  modified_base 10: mod_base = OTHER; note = adenosine-3'-phosphate
  modified_base 11: mod_base = OTHER; note = uridine-3'-phosphate
  modified_base 12: mod_base = OTHER; note = adenosine-3'-phosphate
  modified_base 13: mod_base = OTHER; note = uridine-3'-phosphate
  modified_base 14: mod_base = OTHER; note = guanosine-3'-phosphate
  modified_base 15: mod_base = OTHER; note = cytidine-3'-phosphate
  modified_base 16: mod_base = OTHER; note = uridine-3'-phosphate
  modified_base 17: mod_base = OTHER; note = cytidine-3'-phosphate
  modified_base 18: mod_base = OTHER; note = uridine-3'-phosphate
  modified_base 19: mod_base = OTHER; note = uridine-3'-phosphate
  misc_feature 1..19: note = RNA
  misc_feature 20..21: note = DNA
ctttacattatatgctctttt

SEQ ID NO: 731 - DNA, 21 bp, synthetic construct
  source 1..21: mol_type = other DNA
  modified_base 1: mod_base = OTHER; note = uridine-3'-phosphate
  modified_base 2: mod_base = OTHER; note = cytidine-3'-phosphate
  modified_base 3: mod_base = OTHER; note = uridine-3'-phosphate
  modified_base 4: mod_base = OTHER; note = adenosine-3'-phosphate
  modified_base 5: mod_base = OTHER; note = adenosine-3'-phosphate
  modified_base 6: mod_base = OTHER; note = adenosine-3'-phosphate
  modified_base 7: mod_base = OTHER; note = guanosine-3'-phosphate
  modified_base 8: mod_base = OTHER; note = cytidine-3'-phosphate
  modified_base 9: mod_base = OTHER; note = cytidine-3'-phosphate
  modified_base 10: mod_base = OTHER; note = cytidine-3'-phosphate
  modified_base 11: mod_base = OTHER; note = uridine-3'-phosphate
  modified_base 12: mod_base = OTHER; note = uridine-3'-phosphate
  modified_base 13: mod_base = OTHER; note = uridine-3'-phosphate
  modified_base 14: mod_base = OTHER; note = adenosine-3'-phosphate
  modified_base 15: mod_base = OTHER; note = cytidine-3'-phosphate
  modified_base 16: mod_base = OTHER; note = adenosine-3'-phosphate
  modified_base 17: mod_base = OTHER; note = uridine-3'-phosphate
  modified_base 18: mod_base = OTHER; note = uridine-3'-phosphate
  modified_base 19: mod_base = OTHER; note = adenosine-3'-phosphate
  misc_feature 1..19: note = RNA
  misc_feature 20..21: note = DNA
tctaaagccctttacattatt

SEQ ID NO: 732 - DNA, 21 bp, synthetic construct
  source 1..21: mol_type = other DNA
  modified_base 1: mod_base = OTHER; note = adenosine-3'-phosphate
  modified_base 2: mod_base = OTHER; note = guanosine-3'-phosphate
  modified_base 3: mod_base = OTHER; note = guanosine-3'-phosphate
  modified_base 4: mod_base = OTHER; note = uridine-3'-phosphate
  modified_base 5: mod_base = OTHER; note = cytidine-3'-phosphate
  modified_base 6: mod_base = OTHER; note = uridine-3'-phosphate
  modified_base 7: mod_base = OTHER; note = guanosine-3'-phosphate
  modified_base 8: mod_base = OTHER; note = uridine-3'-phosphate
  modified_base 9: mod_base = OTHER; note = cytidine-3'-phosphate
  modified_base 10: mod_base = OTHER; note = uridine-3'-phosphate
  modified_base 11: mod_base = OTHER; note = cytidine-3'-phosphate
  modified_base 12: mod_base = OTHER; note = adenosine-3'-phosphate
  modified_base 13: mod_base = OTHER; note = cytidine-3'-phosphate
  modified_base 14: mod_base = OTHER; note = uridine-3'-phosphate
  modified_base 15: mod_base = OTHER; note = cytidine-3'-phosphate
  modified_base 16: mod_base = OTHER; note = uridine-3'-phosphate
  modified_base 17: mod_base = OTHER; note = adenosine-3'-phosphate
  modified_base 18: mod_base = OTHER; note = adenosine-3'-phosphate
  modified_base 19: mod_base = OTHER; note = adenosine-3'-phosphate
  misc_feature 1..19: note = RNA
  misc_feature 20..21: note = DNA
aggtctgtctcactctaaatt

SEQ ID NO: 733 - DNA, 21 bp, synthetic construct
  source 1..21: mol_type = other DNA
  modified_base 1: mod_base = OTHER; note = guanosine-3'-phosphate
  modified_base 2: mod_base = OTHER; note = adenosine-3'-phosphate
  modified_base 3: mod_base = OTHER; note = uridine-3'-phosphate
  modified_base 4: mod_base = OTHER; note = uridine-3'-phosphate
  modified_base 5: mod_base = OTHER; note = uridine-3'-phosphate
  modified_base 6: mod_base = OTHER; note = uridine-3'-phosphate
  modified_base 7: mod_base = OTHER; note = adenosine-3'-phosphate
  modified_base 8: mod_base = OTHER; note = adenosine-3'-phosphate
  modified_base 9: mod_base = OTHER; note = uridine-3'-phosphate
  modified_base 10: mod_base = OTHER; note = cytidine-3'-phosphate
  modified_base 11: mod_base = OTHER; note = cytidine-3'-phosphate
  modified_base 12: mod_base = OTHER; note = adenosine-3'-phosphate
  modified_base 13: mod_base = OTHER; note = guanosine-3'-phosphate
  modified_base 14: mod_base = OTHER; note = guanosine-3'-phosphate
  modified_base 15: mod_base = OTHER; note = uridine-3'-phosphate
  modified_base 16: mod_base = OTHER; note = cytidine-3'-phosphate
  modified_base 17: mod_base = OTHER; note = uridine-3'-phosphate
  modified_base 18: mod_base = OTHER; note = guanosine-3'-phosphate
  modified_base 19: mod_base = OTHER; note = uridine-3'-phosphate
  misc_feature 1..19: note = RNA
  misc_feature 20..21: note = DNA
gattttaatccaggtctgttt

SEQ ID NO: 734 - DNA, 21 bp, synthetic construct
  source 1..21: mol_type = other DNA
  modified_base 1: mod_base = OTHER; note = adenosine-3'-phosphate
  modified_base 2: mod_base = OTHER; note = uridine-3'-phosphate
  modified_base 3: mod_base = OTHER; note = uridine-3'-phosphate
  modified_base 4: mod_base = OTHER; note = adenosine-3'-phosphate
  modified_base 5: mod_base = OTHER; note = adenosine-3'-phosphate
  modified_base 6: mod_base = OTHER; note = adenosine-3'-phosphate
  modified_base 7: mod_base = OTHER; note = uridine-3'-phosphate
  modified_base 8: mod_base = OTHER; note = guanosine-3'-phosphate
  modified_base 9: mod_base = OTHER; note = guanosine-3'-phosphate
  modified_base 10: mod_base = OTHER; note = cytidine-3'-phosphate
  modified_base 11: mod_base = OTHER; note = adenosine-3'-phosphate
  modified_base 12: mod_base = OTHER; note = guanosine-3'-phosphate
  modified_base 13: mod_base = OTHER; note = adenosine-3'-phosphate
  modified_base 14: mod_base = OTHER; note = uridine-3'-phosphate
  modified_base 15: mod_base = OTHER; note = uridine-3'-phosphate
  modified_base 16: mod_base = OTHER; note = uridine-3'-phosphate
  modified_base 17: mod_base = OTHER; note = uridine-3'-phosphate
  modified_base 18: mod_base = OTHER; note = adenosine-3'-phosphate
  modified_base 19: mod_base = OTHER; note = adenosine-3'-phosphate
  misc_feature 1..19: note = RNA
  misc_feature 20..21: note = DNA
attaaatggcagattttaatt

SEQ ID NO: 735 - DNA, 21 bp, synthetic construct
  source 1..21: mol_type = other DNA
  modified_base 1: mod_base = OTHER; note = adenosine-3'-phosphate
  modified_base 2: mod_base = OTHER; note = uridine-3'-phosphate
  modified_base 3: mod_base = OTHER; note = adenosine-3'-phosphate
  modified_base 4: mod_base = OTHER; note = uridine-3'-phosphate
  modified_base 5: mod_base = OTHER; note = guanosine-3'-phosphate
  modified_base 6: mod_base = OTHER; note = cytidine-3'-phosphate
  modified_base 7: mod_base = OTHER; note = adenosine-3'-phosphate
  modified_base 8: mod_base = OTHER; note = guanosine-3'-phosphate
  modified_base 9: mod_base = OTHER; note = cytidine-3'-phosphate
  modified_base 10: mod_base = OTHER; note = uridine-3'-phosphate
  modified_base 11: mod_base = OTHER; note = adenosine-3'-phosphate
  modified_base 12: mod_base = OTHER; note = adenosine-3'-phosphate
  modified_base 13: mod_base = OTHER; note = uridine-3'-phosphate
  modified_base 14: mod_base = OTHER; note = uridine-3'-phosphate
  modified_base 15: mod_base = OTHER; note = adenosine-3'-phosphate
  modified_base 16: mod_base = OTHER; note = adenosine-3'-phosphate
  modified_base 17: mod_base = OTHER; note = adenosine-3'-phosphate
  modified_base 18: mod_base = OTHER; note = uridine-3'-phosphate
  modified_base 19: mod_base = OTHER; note = guanosine-3'-phosphate
  misc_feature 1..19: note = RNA
  misc_feature 20..21: note = DNA
atatgcagctaattaaatgtt

SEQ ID NO: 736 - DNA, 21 bp, synthetic construct
  source 1..21: mol_type = other DNA
  modified_base 1: mod_base = OTHER; note = uridine-3'-phosphate
  modified_base 2: mod_base = OTHER; note = uridine-3'-phosphate
  modified_base 3: mod_base = OTHER; note = adenosine-3'-phosphate
  modified_base 4: mod_base = OTHER; note = adenosine-3'-phosphate
  modified_base 5: mod_base = OTHER; note = guanosine-3'-phosphate
  modified_base 6: mod_base = OTHER; note = uridine-3'-phosphate
  modified_base 7: mod_base = OTHER; note = guanosine-3'-phosphate
  modified_base 8: mod_base = OTHER; note = cytidine-3'-phosphate
  modified_base 9: mod_base = OTHER; note = uridine-3'-phosphate
  modified_base 10: mod_base = OTHER; note = guanosine-3'-phosphate
  modified_base 11: mod_base = OTHER; note = uridine-3'-phosphate
  modified_base 12: mod_base = OTHER; note = adenosine-3'-phosphate
  modified_base 13: mod_base = OTHER; note = cytidine-3'-phosphate
  modified_base 14: mod_base = OTHER; note = cytidine-3'-phosphate
  modified_base 15: mod_base = OTHER; note = cytidine-3'-phosphate
  modified_base 16: mod_base = OTHER; note = uridine-3'-phosphate
  modified_base 17: mod_base = OTHER; note = adenosine-3'-phosphate
  modified_base 18: mod_base = OTHER; note = adenosine-3'-phosphate
  modified_base 19: mod_base = OTHER; note = guanosine-3'-phosphate
  misc_feature 1..19: note = RNA
  misc_feature 20..21: note = DNA
ttaagtgctgtaccctaagtt

SEQ ID NO: 737 - DNA, 21 bp, synthetic construct
  source 1..21: mol_type = other DNA
  modified_base 1: mod_base = OTHER; note = cytidine-3'-phosphate
  modified_base 2: mod_base = OTHER; note = adenosine-3'-phosphate
  modified_base 3: mod_base = OTHER; note = guanosine-3'-phosphate
  modified_base 4: mod_base = OTHER; note = adenosine-3'-phosphate
  modified_base 5: mod_base = OTHER; note = uridine-3'-phosphate
  modified_base 6: mod_base = OTHER; note = uridine-3'-phosphate
  modified_base 7: mod_base = OTHER; note = guanosine-3'-phosphate
  modified_base 8: mod_base = OTHER; note = cytidine-3'-phosphate
  modified_base 9: mod_base = OTHER; note = guanosine-3'-phosphate
  modified_base 10: mod_base = OTHER; note = uridine-3'-phosphate
  modified_base 11: mod_base = OTHER; note = uridine-3'-phosphate
  modified_base 12: mod_base = OTHER; note = adenosine-3'-phosphate
  modified_base 13: mod_base = OTHER; note = adenosine-3'-phosphate
  modified_base 14: mod_base = OTHER; note = guanosine-3'-phosphate
  modified_base 15: mod_base = OTHER; note = uridine-3'-phosphate
  modified_base 16: mod_base = OTHER; note = guanosine-3'-phosphate
  modified_base 17: mod_base = OTHER; note = cytidine-3'-phosphate
  modified_base 18: mod_base = OTHER; note = uridine-3'-phosphate
  modified_base 19: mod_base = OTHER; note = guanosine-3'-phosphate
  misc_feature 1..19: note = RNA
  misc_feature 20..21: note = DNA
cagattgcgttaagtgctgtt

SEQ ID NO: 738 - DNA, 21 bp, synthetic construct
  source 1..21: mol_type = other DNA
  modified_base 1: mod_base = OTHER; note = adenosine-3'-phosphate
  modified_base 2: mod_base = OTHER; note = guanosine-3'-phosphate
  modified_base 3: mod_base = OTHER; note = adenosine-3'-phosphate
  modified_base 4: mod_base = OTHER; note = adenosine-3'-phosphate
  modified_base 5: mod_base = OTHER; note = adenosine-3'-phosphate
  modified_base 6: mod_base = OTHER; note = uridine-3'-phosphate
  modified_base 7: mod_base = OTHER; note = uridine-3'-phosphate
  modified_base 8: mod_base = OTHER; note = guanosine-3'-phosphate
  modified_base 9: mod_base = OTHER; note = adenosine-3'-phosphate
  modified_base 10: mod_base = OTHER; note = guanosine-3'-phosphate
  modified_base 11: mod_base = OTHER; note = guanosine-3'-phosphate
  modified_base 12: mod_base = OTHER; note = cytidine-3'-phosphate
  modified_base 13: mod_base = OTHER; note = adenosine-3'-phosphate
  modified_base 14: mod_base = OTHER; note = guanosine-3'-phosphate
  modified_base 15: mod_base = OTHER; note = adenosine-3'-phosphate
  modified_base 16: mod_base = OTHER; note = uridine-3'-phosphate
  modified_base 17: mod_base = OTHER; note = uridine-3'-phosphate
  modified_base 18: mod_base = OTHER; note = guanosine-3'-phosphate
  modified_base 19: mod_base = OTHER; note = cytidine-3'-phosphate
  misc_feature 1..19: note = RNA
  misc_feature 20..21: note = DNA
agaaattgaggcagattgctt

SEQ ID NO: 739 - DNA, 21 bp, synthetic construct
  source 1..21: mol_type = other DNA
  modified_base 1: mod_base = OTHER; note = uridine-3'-phosphate
  modified_base 2: mod_base = OTHER; note = uridine-3'-phosphate
  modified_base 3: mod_base = OTHER; note = uridine-3'-phosphate
  modified_base 4: mod_base = OTHER; note = guanosine-3'-phosphate
  modified_base 5: mod_base = OTHER; note = adenosine-3'-phosphate
  modified_base 6: mod_base = OTHER; note = cytidine-3'-phosphate
  modified_base 7: mod_base = OTHER; note = adenosine-3'-phosphate
  modified_base 8: mod_base = OTHER; note = guanosine-3'-phosphate
  modified_base 9: mod_base = OTHER; note = adenosine-3'-phosphate
  modified_base 10: mod_base = OTHER; note = uridine-3'-phosphate
  modified_base 11: mod_base = OTHER; note = guanosine-3'-phosphate
  modified_base 12: mod_base = OTHER; note = adenosine-3'-phosphate
  modified_base 13: mod_base = OTHER; note = adenosine-3'-phosphate
  modified_base 14: mod_base = OTHER; note = guanosine-3'-phosphate
  modified_base 15: mod_base = OTHER; note = adenosine-3'-phosphate
  modified_base 16: mod_base = OTHER; note = adenosine-3'-phosphate
  modified_base 17: mod_base = OTHER; note = adenosine-3'-phosphate
  modified_base 18: mod_base = OTHER; note = uridine-3'-phosphate
  modified_base 19: mod_base = OTHER; note = uridine-3'-phosphate
  misc_feature 1..19: note = RNA
  misc_feature 20..21: note = DNA
tttgacagatgaagaaatttt

SEQ ID NO: 740 - DNA, 21 bp, synthetic construct
  source 1..21: mol_type = other DNA
  modified_base 1: mod_base = OTHER; note = adenosine-3'-phosphate
  modified_base 2: mod_base = OTHER; note = guanosine-3'-phosphate
  modified_base 3: mod_base = OTHER; note = cytidine-3'-phosphate
  modified_base 4: mod_base = OTHER; note = cytidine-3'-phosphate
  modified_base 5: mod_base = OTHER; note = adenosine-3'-phosphate
  modified_base 6: mod_base = OTHER; note = adenosine-3'-phosphate
  modified_base 7: mod_base = OTHER; note = guanosine-3'-phosphate
  modified_base 8: mod_base = OTHER; note = cytidine-3'-phosphate
  modified_base 9: mod_base = OTHER; note = adenosine-3'-phosphate
  modified_base 10: mod_base = OTHER; note = guanosine-3'-phosphate
  modified_base 11: mod_base = OTHER; note = adenosine-3'-phosphate
  modified_base 12: mod_base = OTHER; note = adenosine-3'-phosphate
  modified_base 13: mod_base = OTHER; note = uridine-3'-phosphate
  modified_base 14: mod_base = OTHER; note = uridine-3'-phosphate
  modified_base 15: mod_base = OTHER; note = guanosine-3'-phosphate
  modified_base 16: mod_base = OTHER; note = guanosine-3'-phosphate
  modified_base 17: mod_base = OTHER; note = uridine-3'-phosphate
  modified_base 18: mod_base = OTHER; note = uridine-3'-phosphate
  modified_base 19: mod_base = OTHER; note = cytidine-3'-phosphate
  misc_feature 1..19: note = RNA
  misc_feature 20..21: note = DNA
agccaagcagaattggttctt

SEQ ID NO: 741 - DNA, 21 bp, synthetic construct
  source 1..21: mol_type = other DNA
  modified_base 1: mod_base = OTHER; note = adenosine-3'-phosphate
  modified_base 2: mod_base = OTHER; note = cytidine-3'-phosphate
  modified_base 3: mod_base = OTHER; note = adenosine-3'-phosphate
  modified_base 4: mod_base = OTHER; note = adenosine-3'-phosphate
  modified_base 5: mod_base = OTHER; note = uridine-3'-phosphate
  modified_base 6: mod_base = OTHER; note = adenosine-3'-phosphate
  modified_base 7: mod_base = OTHER; note = adenosine-3'-phosphate
  modified_base 8: mod_base = OTHER; note = uridine-3'-phosphate
  modified_base 9: mod_base = OTHER; note = uridine-3'-phosphate
  modified_base 10: mod_base = OTHER; note = cytidine-3'-phosphate
  modified_base 11: mod_base = OTHER; note = uridine-3'-phosphate
  modified_base 12: mod_base = OTHER; note = guanosine-3'-phosphate
  modified_base 13: mod_base = OTHER; note = uridine-3'-phosphate
  modified_base 14: mod_base = OTHER; note = adenosine-3'-phosphate
  modified_base 15: mod_base = OTHER; note = guanosine-3'-phosphate
  modified_base 16: mod_base = OTHER; note = cytidine-3'-phosphate
  modified_base 17: mod_base = OTHER; note = cytidine-3'-phosphate
  modified_base 18: mod_base = OTHER; note = adenosine-3'-phosphate
  modified_base 19: mod_base = OTHER; note = adenosine-3'-phosphate
  misc_feature 1..19: note = RNA
  misc_feature 20..21: note = DNA
acaataattctgtagccaatt

SEQ ID NO: 742 - DNA, 21 bp, synthetic construct
  source 1..21: mol_type = other DNA
  modified_base 1: mod_base = OTHER; note = adenosine-3'-phosphate
  modified_base 2: mod_base = OTHER; note = uridine-3'-phosphate
  modified_base 3: mod_base = OTHER; note = uridine-3'-phosphate
  modified_base 4: mod_base = OTHER; note = uridine-3'-phosphate
  modified_base 5: mod_base = OTHER; note = uridine-3'-phosphate
  modified_base 6: mod_base = OTHER; note = adenosine-3'-phosphate
  modified_base 7: mod_base = OTHER; note = uridine-3'-phosphate
  modified_base 8: mod_base = OTHER; note = cytidine-3'-phosphate
  modified_base 9: mod_base = OTHER; note = cytidine-3'-phosphate
  modified_base 10: mod_base = OTHER; note = uridine-3'-phosphate
  modified_base 11: mod_base = OTHER; note = cytidine-3'-phosphate
  modified_base 12: mod_base = OTHER; note = adenosine-3'-phosphate
  modified_base 13: mod_base = OTHER; note = cytidine-3'-phosphate
  modified_base 14: mod_base = OTHER; note = adenosine-3'-phosphate
  modified_base 15: mod_base = OTHER; note = adenosine-3'-phosphate
  modified_base 16: mod_base = OTHER; note = uridine-3'-phosphate
  modified_base 17: mod_base = OTHER; note = adenosine-3'-phosphate
  modified_base 18: mod_base = OTHER; note = adenosine-3'-phosphate
  modified_base 19: mod_base = OTHER; note = uridine-3'-phosphate
  misc_feature 1..19: note = RNA
  misc_feature 20..21: note = DNA
attttatcctcacaataattt

SEQ ID NO: 743 - DNA, 21 bp, synthetic construct
  source 1..21: mol_type = other DNA
  modified_base 1: mod_base = OTHER; note = uridine-3'-phosphate
  modified_base 2: mod_base = OTHER; note = uridine-3'-phosphate
  modified_base 3: mod_base = OTHER; note = adenosine-3'-phosphate
  modified_base 4: mod_base = OTHER; note = uridine-3'-phosphate
  modified_base 5: mod_base = OTHER; note = adenosine-3'-phosphate
  modified_base 6: mod_base = OTHER; note = uridine-3'-phosphate
  modified_base 7: mod_base = OTHER; note = adenosine-3'-phosphate
  modified_base 8: mod_base = OTHER; note = uridine-3'-phosphate
  modified_base 9: mod_base = OTHER; note = guanosine-3'-phosphate
  modified_base 10: mod_base = OTHER; note = adenosine-3'-phosphate
  modified_base 11: mod_base = OTHER; note = uridine-3'-phosphate
  modified_base 12: mod_base = OTHER; note = uridine-3'-phosphate
  modified_base 13: mod_base = OTHER; note = uridine-3'-phosphate
  modified_base 14: mod_base = OTHER; note = uridine-3'-phosphate
  modified_base 15: mod_base = OTHER; note = adenosine-3'-phosphate
  modified_base 16: mod_base = OTHER; note = uridine-3'-phosphate
  modified_base 17: mod_base = OTHER; note = cytidine-3'-phosphate
  modified_base 18: mod_base = OTHER; note = cytidine-3'-phosphate
  modified_base 19: mod_base = OTHER; note = uridine-3'-phosphate
  misc_feature 1..19: note = RNA
  misc_feature 20..21: note = DNA
ttatatatgattttatccttt

SEQ ID NO: 744 - DNA, 21 bp, synthetic construct
  source 1..21: mol_type = other DNA
  modified_base 1: mod_base = OTHER; note = adenosine-3'-phosphate
  modified_base 2: mod_base = OTHER; note = uridine-3'-phosphate
  modified_base 3: mod_base = OTHER; note = guanosine-3'-phosphate
  modified_base 4: mod_base = OTHER; note = cytidine-3'-phosphate
  modified_base 5: mod_base = OTHER; note = uridine-3'-phosphate
  modified_base 6: mod_base = OTHER; note = guanosine-3'-phosphate
  modified_base 7: mod_base = OTHER; note = guanosine-3'-phosphate
  modified_base 8: mod_base = OTHER; note = guanosine-3'-phosphate
  modified_base 9: mod_base = OTHER; note = cytidine-3'-phosphate
  modified_base 10: mod_base = OTHER; note = adenosine-3'-phosphate
  modified_base 11: mod_base = OTHER; note = uridine-3'-phosphate
  modified_base 12: mod_base = OTHER; note = uridine-3'-phosphate
  modified_base 13: mod_base = OTHER; note = uridine-3'-phosphate
  modified_base 14: mod_base = OTHER; note = uridine-3'-phosphate
  modified_base 15: mod_base = OTHER; note = adenosine-3'-phosphate
  modified_base 16: mod_base = OTHER; note = uridine-3'-phosphate
  modified_base 17: mod_base = OTHER; note = adenosine-3'-phosphate
  modified_base 18: mod_base = OTHER; note = uridine-3'-phosphate
  modified_base 19: mod_base = OTHER; note = adenosine-3'-phosphate
  misc_feature 1..19: note = RNA
  misc_feature 20..21: note = DNA
atgctgggcattttatatatt

SEQ ID NO: 745 - RNA, 19 nt, synthetic construct
  source 1..19: mol_type = other RNA
aggcagggctgcagatgcg

SEQ ID NO: 746 - RNA, 19 nt, synthetic construct
  source 1..19: mol_type = other RNA
gcagatgcgaggcccagct

SEQ ID NO: 747 - RNA, 19 nt, synthetic construct
  source 1..19: mol_type = other RNA
gcccagctgtacctcgcgt

SEQ ID NO: 748 - RNA, 19 nt, synthetic construct
  source 1..19: mol_type = other RNA
acctcgcgtgtcccgggtc

SEQ ID NO: 749 - RNA, 19 nt, synthetic construct
  source 1..19: mol_type = other RNA
ccgggtcgggagtcggaga

SEQ ID NO: 750 - RNA, 19 nt, synthetic construct
  source 1..19: mol_type = other RNA
tcggagacgcaggtgcagg

SEQ ID NO: 751 - RNA, 19 nt, synthetic construct
  source 1..19: mol_type = other RNA
caggtgcaggagagtgcgg

SEQ ID NO: 752 - RNA, 19 nt, synthetic construct
  source 1..19: mol_type = other RNA
agtgcggggcaagtagcgc

SEQ ID NO: 753 - RNA, 19 nt, synthetic construct
  source 1..19: mol_type = other RNA
aagtagcgcattttctctt

SEQ ID NO: 754 - RNA, 19 nt, synthetic construct
  source 1..19: mol_type = other RNA
ttctctttgcattctcgag

SEQ ID NO: 755 - RNA, 19 nt, synthetic construct
  source 1..19: mol_type = other RNA
ttctcgagatcgcttagcc

SEQ ID NO: 756 - RNA, 19 nt, synthetic construct
  source 1..19: mol_type = other RNA
tttaaaaaggtttgcatca

SEQ ID NO: 757 - RNA, 19 nt, synthetic construct
  source 1..19: mol_type = other RNA
ttgcatcagctgtgagtcc

SEQ ID NO: 758 - RNA, 19 nt, synthetic construct
  source 1..19: mol_type = other RNA
tgtgagtccatctgacaag

SEQ ID NO: 759 - RNA, 19 nt, synthetic construct
  source 1..19: mol_type = other RNA
tctgacaagcgaggaaact

SEQ ID NO: 760 - RNA, 19 nt, synthetic construct
  source 1..19: mol_type = other RNA
gaaactaaggctgagaagt

SEQ ID NO: 761 - RNA, 19 nt, synthetic construct
  source 1..19: mol_type = other RNA
ctgagaagtgggaggcgtt

SEQ ID NO: 762 - RNA, 19 nt, synthetic construct
  source 1..19: mol_type = other RNA
aggcgttgccatctgcagg

SEQ ID NO: 763 - RNA, 19 nt, synthetic construct
  source 1..19: mol_type = other RNA
tctgcaggcccaggcaacc

SEQ ID NO: 764 - RNA, 19 nt, synthetic construct
  source 1..19: mol_type = other RNA
aggcaacctgctacgggaa

SEQ ID NO: 765 - RNA, 19 nt, synthetic construct
  source 1..19: mol_type = other RNA
tacgggaagaccggggacc

SEQ ID NO: 766 - RNA, 19 nt, synthetic construct
  source 1..19: mol_type = other RNA
cggggaccaagacctctgg

SEQ ID NO: 767 - RNA, 19 nt, synthetic construct
  source 1..19: mol_type = other RNA
agacctctgggttggcttt

SEQ ID NO: 768 - RNA, 19 nt, synthetic construct
  source 1..19: mol_type = other RNA
ttggctttcctagacccgc

SEQ ID NO: 769 - RNA, 19 nt, synthetic construct
  source 1..19: mol_type = other RNA
agacccgctcgggtcttcg

SEQ ID NO: 770 - RNA, 19 nt, synthetic construct
  source 1..19: mol_type = other RNA
tcttcgggtgtcgcgagga

SEQ ID NO: 771 - RNA, 19 nt, synthetic construct
  source 1..19: mol_type = other RNA
cgcgaggaagggccctgct

SEQ ID NO: 772 - RNA, 19 nt, synthetic construct
  source 1..19: mol_type = other RNA
gggccctgctcctttcgtt

SEQ ID NO: 773 - RNA, 19 nt, synthetic construct
  source 1..19: mol_type = other RNA
tgcacccctggccgctgca

SEQ ID NO: 774 - RNA, 19 nt, synthetic construct
  source 1..19: mol_type = other RNA
ccgctgcaggtggctccct

SEQ ID NO: 775 - RNA, 19 nt, synthetic construct
  source 1..19: mol_type = other RNA
gctccctggaggaggagct

SEQ ID NO: 776 - RNA, 19 nt, synthetic construct
  source 1..19: mol_type = other RNA
aggagctcccacgcggagg

SEQ ID NO: 777 - RNA, 19 nt, synthetic construct
  source 1..19: mol_type = other RNA
acgcggaggaggagccagg

SEQ ID NO: 778 - RNA, 19 nt, synthetic construct
  source 1..19: mol_type = other RNA
agccagggcagctgggagc

SEQ ID NO: 779 - RNA, 19 nt, synthetic construct
  source 1..19: mol_type = other RNA
ctgggagcggggacaccat

SEQ ID NO: 780 - RNA, 19 nt, synthetic construct
  source 1..19: mol_type = other RNA
ggacaccatcctcctggat

SEQ ID NO: 781 - RNA, 19 nt, synthetic construct
  source 1..19: mol_type = other RNA
cctggataagaggcagagg

SEQ ID NO: 782 - RNA, 19 nt, synthetic construct
  source 1..19: mol_type = other RNA
aggcagaggccgggaggaa

SEQ ID NO: 783 - RNA, 19 nt, synthetic construct
  source 1..19: mol_type = other RNA
ggaggaaccccgtcagccg

SEQ ID NO: 784 - RNA, 19 nt, synthetic construct
  source 1..19: mol_type = other RNA
cgtcagccgggcgggcagg

SEQ ID NO: 785 - RNA, 19 nt, synthetic construct
  source 1..19: mol_type = other RNA
cgggcaggaagctctggga

SEQ ID NO: 786 - RNA, 19 nt, synthetic construct
  source 1..19: mol_type = other RNA
tctgggagtagcctcatgg

SEQ ID NO: 787 - RNA, 19 nt, synthetic construct
  source 1..19: mol_type = other RNA
agcctcatggaagagaagc

SEQ ID NO: 788 - RNA, 19 nt, synthetic construct
  source 1..19: mol_type = other RNA
agaagcagatcctgtgcgt

SEQ ID NO: 789 - RNA, 19 nt, synthetic construct
  source 1..19: mol_type = other RNA
ctgtgcgtggggctagtgg

SEQ ID NO: 790 - RNA, 19 nt, synthetic construct
  source 1..19: mol_type = other RNA
ggctagtggtgctggacgt

SEQ ID NO: 791 - RNA, 19 nt, synthetic construct
  source 1..19: mol_type = other RNA
tggacgtcatcagcctggt

SEQ ID NO: 792 - RNA, 19 nt, synthetic construct
  source 1..19: mol_type = other RNA
agcctggtggacaagtacc

SEQ ID NO: 793 - RNA, 19 nt, synthetic construct
  source 1..19: mol_type = other RNA
acaagtaccctaaggagga

SEQ ID NO: 794 - RNA, 19 nt, synthetic construct
  source 1..19: mol_type = other RNA
aaggaggactcggagataa

SEQ ID NO: 795 - RNA, 19 nt, synthetic construct
  source 1..19: mol_type = other RNA
cggagataaggagcctgcc

SEQ ID NO: 796 - RNA, 19 nt, synthetic construct
  source 1..19: mol_type = other RNA
agcctgccagatgtgtctg

SEQ ID NO: 797 - RNA, 19 nt, synthetic construct
  source 1..19: mol_type = other RNA
tgtgtctgctacagacttt

SEQ ID NO: 798 - RNA, 19 nt, synthetic construct
  source 1..19: mol_type = other RNA
cagactttgagaaggttga

SEQ ID NO: 799 - RNA, 19 nt, synthetic construct
  source 1..19: mol_type = other RNA
aggttgatctgacccagtt

SEQ ID NO: 800 - RNA, 19 nt, synthetic construct
  source 1..19: mol_type = other RNA
acccagttcaagtggatcc

SEQ ID NO: 801 - RNA, 19 nt, synthetic construct
  source 1..19: mol_type = other RNA
agtggatccacattgaggg

SEQ ID NO: 802 - RNA, 19 nt, synthetic construct
  source 1..19: mol_type = other RNA
ttgagggccggaacgcatc

SEQ ID NO: 803 - RNA, 19 nt, synthetic construct
  source 1..19: mol_type = other RNA
aacgcatcggagcaggtga

SEQ ID NO: 804 - RNA, 19 nt, synthetic construct
  source 1..19: mol_type = other RNA
agcaggtgaagatgctgca

SEQ ID NO: 805 - RNA, 19 nt, synthetic construct
  source 1..19: mol_type = other RNA
tgctgcagcggatagacgc

SEQ ID NO: 806 - RNA, 19 nt, synthetic construct
  source 1..19: mol_type = other RNA
atagacgcacacaacacca

SEQ ID NO: 807 - RNA, 19 nt, synthetic construct
  source 1..19: mol_type = other RNA
cagcctccagagcagaaga

SEQ ID NO: 808 - RNA, 19 nt, synthetic construct
  source 1..19: mol_type = other RNA
agaagatccgggtgtccgt

SEQ ID NO: 809 - RNA, 19 nt, synthetic construct
  source 1..19: mol_type = other RNA
gtgtccgtggaggtggaga

SEQ ID NO: 810 - RNA, 19 nt, synthetic construct
  source 1..19: mol_type = other RNA
aggtggagaagccacgaga

SEQ ID NO: 811 - RNA, 19 nt, synthetic construct
  source 1..19: mol_type = other RNA
ccacgagaggagctcttcc

SEQ ID NO: 812 - RNA, 19 nt, synthetic construct
  source 1..19: mol_type = other RNA
agctcttccagctgtttgg

SEQ ID NO: 813 - RNA, 19 nt, synthetic construct
  source 1..19: mol_type = other RNA
tgtttggctacggagacgt

SEQ ID NO: 814 - RNA, 19 nt, synthetic construct
  source 1..19: mol_type = other RNA
ggagacgtggtgtttgtca

SEQ ID NO: 815 - RNA, 19 nt, synthetic construct
  source 1..19: mol_type = other RNA
tttgtcagcaaagatgtgg

SEQ ID NO: 816 - RNA, 19 nt, synthetic construct
  source 1..19: mol_type = other RNA
aaagatgtggccaagcact

SEQ ID NO: 817 - RNA, 19 nt, synthetic construct
  source 1..19: mol_type = other RNA
aagcacttggggttccagt

SEQ ID NO: 818 - RNA, 19 nt, synthetic construct
  source 1..19: mol_type = other RNA
ttccagtcagcagaggaag

SEQ ID NO: 819 - RNA, 19 nt, synthetic construct
  source 1..19: mol_type = other RNA
agaggaagccttgaggggc

SEQ ID NO: 820 - RNA, 19 nt, synthetic construct
  source 1..19: mol_type = other RNA
ttgaggggcttgtatggtc

SEQ ID NO: 821 - RNA, 19 nt, synthetic construct
  source 1..19: mol_type = other RNA
tatggtcgtgtgaggaaag

SEQ ID NO: 822 - RNA, 19 nt, synthetic construct
  source 1..19: mol_type = other RNA
tgaggaaaggggctgtgct

SEQ ID NO: 823 - RNA, 19 nt, synthetic construct
  source 1..19: mol_type = other RNA
ctgtgcctgggctgaggag

SEQ ID NO: 824 - RNA, 19 nt, synthetic construct
  source 1..19: mol_type = other RNA
tgaggagggcgccgacgcc

SEQ ID NO: 825 - RNA, 19 nt, synthetic construct
  source 1..19: mol_type = other RNA
ccgacgccctgggccctga

SEQ ID NO: 826 - RNA, 19 nt, synthetic construct
  source 1..19: mol_type = other RNA
tgggccctgatggcaaatt

SEQ ID NO: 827 - RNA, 19 nt, synthetic construct
  source 1..19: mol_type = other RNA
caaattgctccactcggat

SEQ ID NO: 828 - RNA, 19 nt, synthetic construct
  source 1..19: mol_type = other RNA
actcggatgctttcccgcc

SEQ ID NO: 829 - RNA, 19 nt, synthetic construct
  source 1..19: mol_type = other RNA
tttcccgccaccccgcgtg

SEQ ID NO: 830 - RNA, 19 nt, synthetic construct
  source 1..19: mol_type = other RNA
ccgcgtggtggatacactg

SEQ ID NO: 831 - RNA, 19 nt, synthetic construct
  source 1..19: mol_type = other RNA
atacactgggagctggaga

SEQ ID NO: 832 - RNA, 19 nt, synthetic construct
  source 1..19: mol_type = other RNA
agctggagacaccttcaat

SEQ ID NO: 833 - RNA, 19 nt, synthetic construct
  source 1..19: mol_type = other RNA
accttcaatgcctccgtca

SEQ ID NO: 834 - RNA, 19 nt, synthetic construct
  source 1..19: mol_type = other RNA
tccgtcatcttcagcctct

SEQ ID NO: 835 - RNA, 19 nt, synthetic construct
  source 1..19: mol_type = other RNA
agcctctcccaggggagga

SEQ ID NO: 836 - RNA, 19 nt, synthetic construct
  source 1..19: mol_type = other RNA
tgcaggaagcactgagatt

SEQ ID NO: 837 - RNA, 19 nt, synthetic construct
  source 1..19: mol_type = other RNA
ctgagattcgggtgccagg

SEQ ID NO: 838 - RNA, 19 nt, synthetic construct
  source 1..19: mol_type = other RNA
ggtgccaggtggccggcaa

SEQ ID NO: 839 - RNA, 19 nt, synthetic construct
  source 1..19: mol_type = other RNA
agtgtggcctgcagggctt

SEQ ID NO: 840 - RNA, 19 nt, synthetic construct
  source 1..19: mol_type = other RNA
cagggctttgatggcatcg

SEQ ID NO: 841 - RNA, 19 nt, synthetic construct
  source 1..19: mol_type = other RNA
gcatcgtgtgagagcaggt

SEQ ID NO: 842 - RNA, 19 nt, synthetic construct
  source 1..19: mol_type = other RNA
agagcaggtgccggctcct

SEQ ID NO: 843 - RNA, 19 nt, synthetic construct
  source 1..19: mol_type = other RNA
ccggctcctcacacaccat

SEQ ID NO: 844 - RNA, 19 nt, synthetic construct
  source 1..19: mol_type = other RNA
cacaccatggagactacca

SEQ ID NO: 845 - RNA, 19 nt, synthetic construct
  source 1..19: mol_type = other RNA
actaccattgcggctgcat

SEQ ID NO: 846 - RNA, 19 nt, synthetic construct
  source 1..19: mol_type = other RNA
cggctgcatcgccttctcc

SEQ ID NO: 847 - RNA, 19 nt, synthetic construct
  source 1..19: mol_type = other RNA
ttctcccctccatccagcc

SEQ ID NO: 848 - RNA, 19 nt, synthetic construct
  source 1..19: mol_type = other RNA
atccagcctggcgtccagg

SEQ ID NO: 849 - RNA, 19 nt, synthetic construct
  source 1..19: mol_type = other RNA
ggcgtccaggttgccctgt

SEQ ID NO: 850 - RNA, 19 nt, synthetic construct
  source 1..19: mol_type = other RNA
ccctgttcaggggacagat

SEQ ID NO: 851 - RNA, 19 nt, synthetic construct
  source 1..19: mol_type = other RNA
ggggacagatgcaagctgt

SEQ ID NO: 852 - RNA, 19 nt, synthetic construct
  source 1..19: mol_type = other RNA
caagctgtggggaggactc

SEQ ID NO: 853 - RNA, 19 nt, synthetic construct
  source 1..19: mol_type = other RNA
aggactctgcctgtgtcct

SEQ ID NO: 854 - RNA, 19 nt, synthetic construct
  source 1..19: mol_type = other RNA
ctgtgtcctgtgttcccca

SEQ ID NO: 855 - RNA, 19 nt, synthetic construct
  source 1..19: mol_type = other RNA
ttccccacagggagaggct

SEQ ID NO: 856 - RNA, 19 nt, synthetic construct
  source 1..19: mol_type = other RNA
agaggctctggggggatgg

SEQ ID NO: 857 - RNA, 19 nt, synthetic construct
  source 1..19: mol_type = other RNA
ggggggatggctgggggat

SEQ ID NO: 858 - RNA, 19 nt, synthetic construct
  source 1..19: mol_type = other RNA
tgggggatgcagagcctca

SEQ ID NO: 859 - RNA, 19 nt, synthetic construct
  source 1..19: mol_type = other RNA
agcctcagagcaaataaat

SEQ ID NO: 860 - RNA, 19 nt, synthetic construct
  source 1..19: mol_type = other RNA
aaataaatcttcctcagag

SEQ ID NO: 861 - RNA, 19 nt, synthetic construct
  source 1..19: mol_type = other RNA
cctcagagccagcttctcc

SEQ ID NO: 862 - RNA, 19 nt, synthetic construct
  source 1..19: mol_type = other RNA
agcttctcctctcaatgtc

SEQ ID NO: 863 - RNA, 19 nt, synthetic construct
  source 1..19: mol_type = other RNA
tcaatgtctgaactgctct

SEQ ID NO: 864 - RNA, 19 nt, synthetic construct
  source 1..19: mol_type = other RNA
tgctctggctgggcattcc

SEQ ID NO: 865 - RNA, 19 nt, synthetic construct
  source 1..19: mol_type = other RNA
tgggcattcctgaggctct

SEQ ID NO: 866 - RNA, 19 nt, synthetic construct
  source 1..19: mol_type = other RNA
gaggctctgactcttcgat

SEQ ID NO: 867 - RNA, 19 nt, synthetic construct
  source 1..19: mol_type = other RNA
ccattccccaaattaacct

SEQ ID NO: 868 - RNA, 19 nt, synthetic construct
  source 1..19: mol_type = other RNA
ttaacctctccgcccaggc

SEQ ID NO: 869 - RNA, 19 nt, synthetic construct
  source 1..19: mol_type = other RNA
gcccaggcccagaggaggg

SEQ ID NO: 870 - RNA, 19 nt, synthetic construct
  source 1..19: mol_type = other RNA
cagaggaggggctgcctgg

SEQ ID NO: 871 - RNA, 19 nt, synthetic construct
  source 1..19: mol_type = other RNA
tgcctgggctagagcagcg

SEQ ID NO: 872 - RNA, 19 nt, synthetic construct
  source 1..19: mol_type = other RNA
agagcagcgagaagtgccc

SEQ ID NO: 873 - RNA, 19 nt, synthetic construct
  source 1..19: mol_type = other RNA
aagtgccctgggcttgcca

SEQ ID NO: 874 - RNA, 19 nt, synthetic construct
  source 1..19: mol_type = other RNA
ttgccaccagctctgccct

SEQ ID NO: 875 - RNA, 19 nt, synthetic construct
  source 1..19: mol_type = other RNA
ctctgccctggctggggag

SEQ ID NO: 876 - RNA, 19 nt, synthetic construct
  source 1..19: mol_type = other RNA
gctggggaggacactcggt

SEQ ID NO: 877 - RNA, 19 nt, synthetic construct
  source 1..19: mol_type = other RNA
acacccagtgaacctgcca

SEQ ID NO: 878 - RNA, 19 nt, synthetic construct
  source 1..19: mol_type = other RNA
aacctgccaaagaaaccgt

SEQ ID NO: 879 - RNA, 19 nt, synthetic construct
  source 1..19: mol_type = other RNA
agaaaccgtgagagctctt

SEQ ID NO: 880 - RNA, 19 nt, synthetic construct
  source 1..19: mol_type = other RNA
gctcttcggggccctgcgt

SEQ ID NO: 881 - RNA, 19 nt, synthetic construct
  source 1..19: mol_type = other RNA
ccctgcgttgtgcagactc

SEQ ID NO: 882 - RNA, 19 nt, synthetic construct
  source 1..19: mol_type = other RNA
tgcagactctattcccaca

SEQ ID NO: 883 - RNA, 19 nt, synthetic construct
  source 1..19: mol_type = other RNA
ttcccacagctcagaagct

SEQ ID NO: 884 - RNA, 19 nt, synthetic construct
  source 1..19: mol_type = other RNA
cagaagctgggagtccaca

SEQ ID NO: 885 - RNA, 19 nt, synthetic construct
  source 1..19: mol_type = other RNA
gagtccacaccgctgagct

SEQ ID NO: 886 - RNA, 19 nt, synthetic construct
  source 1..19: mol_type = other RNA
tgagctgaactgacaggcc

SEQ ID NO: 887 - RNA, 19 nt, synthetic construct
  source 1..19: mol_type = other RNA
tgacaggccagtggggggc

SEQ ID NO: 888 - RNA, 19 nt, synthetic construct
  source 1..19: mol_type = other RNA
tggggggcaggggtgcgcc

SEQ ID NO: 889 - RNA, 19 nt, synthetic construct
  source 1..19: mol_type = other RNA
ggtgcgcctcctctgccct

SEQ ID NO: 890 - RNA, 19 nt, synthetic construct
  source 1..19: mol_type = other RNA
tctgccctgcccaccagcc

SEQ ID NO: 891 - RNA, 19 nt, synthetic construct
  source 1..19: mol_type = other RNA
accagcctgtgatttgatg

SEQ ID NO: 892 - RNA, 19 nt, synthetic construct
  source 1..19: mol_type = other RNA
tgatttgatggggtcttca

SEQ ID NO: 893 - RNA, 19 nt, synthetic construct
  source 1..19: mol_type = other RNA
gtcttcattgtccagaaat

SEQ ID NO: 894 - RNA, 19 nt, synthetic construct
  source 1..19: mol_type = other RNA
tccagaaatacctcctccc

SEQ ID NO: 895 - RNA, 19 nt, synthetic construct
  source 1..19: mol_type = other RNA
tcctcccgctgactgcccc

SEQ ID NO: 896 - RNA, 19 nt, synthetic construct
  source 1..19: mol_type = other RNA
actgccccagagcctgaaa

SEQ ID NO: 897 - RNA, 19 nt, synthetic construct
  source 1..19: mol_type = other RNA
agcctgaaagtctcaccct

SEQ ID NO: 898 - RNA, 19 nt, synthetic construct
  source 1..19: mol_type = other RNA
tcacccttggagcccacct

SEQ ID NO: 899 - RNA, 19 nt, synthetic construct
  source 1..19: mol_type = other RNA
cccaccttggaattaaggg

SEQ ID NO: 900 - RNA, 19 nt, synthetic construct
  source 1..19: mol_type = other RNA
gaattaagggcgtgcctca

SEQ ID NO: 901 - RNA, 19 nt, synthetic construct
  source 1..19: mol_type = other RNA
tgcctcagccacaaatgtg

SEQ ID NO: 902 - RNA, 19 nt, synthetic construct
  source 1..19: mol_type = other RNA
acaaatgtgacccaggata

SEQ ID NO: 903 - RNA, 19 nt, synthetic construct
  source 1..19: mol_type = other RNA
caggatacagagtgttgct

SEQ ID NO: 904 - RNA, 19 nt, synthetic construct
  source 1..19: mol_type = other RNA
agtgttgctgtcctcaggg

SEQ ID NO: 905 - RNA, 19 nt, synthetic construct
  source 1..19: mol_type = other RNA
cctcagggaggtccgatct

SEQ ID NO: 906 - RNA, 19 nt, synthetic construct
  source 1..19: mol_type = other RNA
tccgatctggaacacatat

SEQ ID NO: 907 - RNA, 19 nt, synthetic construct
  source 1..19: mol_type = other RNA
acacatattggaattgggg

SEQ ID NO: 908 - RNA, 19 nt, synthetic construct
  source 1..19: mol_type = other RNA
ttggggccaactccaatat

SEQ ID NO: 909 - RNA, 19 nt, synthetic construct
  source 1..19: mol_type = other RNA
actccaatatagggtgggt

SEQ ID NO: 910 - RNA, 19 nt, synthetic construct
  source 1..19: mol_type = other RNA
gtgggtaaggccttataat

SEQ ID NO: 911 - RNA, 19 nt, synthetic construct
  source 1..19: mol_type = other RNA
ccttataatgtaaagagca

SEQ ID NO: 912 - RNA, 19 nt, synthetic construct
  source 1..19: mol_type = other RNA
aagagcatataatgtaaag

SEQ ID NO: 913 - RNA, 19 nt, synthetic construct
  source 1..19: mol_type = other RNA
taatgtaaagggctttaga

SEQ ID NO: 914 - RNA, 19 nt, synthetic construct
  source 1..19: mol_type = other RNA
tttagagtgagacagacct

SEQ ID NO: 915 - RNA, 19 nt, synthetic construct
  source 1..19: mol_type = other RNA
acagacctggattaaaatc

SEQ ID NO: 916 - RNA, 19 nt, synthetic construct
  source 1..19: mol_type = other RNA
ttaaaatctgccatttaat

SEQ ID NO: 917 - RNA, 19 nt, synthetic construct
  source 1..19: mol_type = other RNA
catttaattagctgcatat

SEQ ID NO: 918 - RNA, 19 nt, synthetic construct
  source 1..19: mol_type = other RNA
cttagggtacagcacttaa

SEQ ID NO: 919 - RNA, 19 nt, synthetic construct
  source 1..19: mol_type = other RNA
cagcacttaacgcaatctg

SEQ ID NO: 920 - RNA, 19 nt, synthetic construct
  source 1..19: mol_type = other RNA
gcaatctgcctcaatttct

SEQ ID NO: 921 - RNA, 19 nt, synthetic construct
  source 1..19: mol_type = other RNA
aatttcttcatctgtcaaa

SEQ ID NO: 922 - RNA, 19 nt, synthetic construct
  source 1..19: mol_type = other RNA
gaaccaattctgcttggct

SEQ ID NO: 923 - RNA, 19 nt, synthetic construct
  source 1..19: mol_type = other RNA
ttggctacagaattattgt

SEQ ID NO: 924 - RNA, 19 nt, synthetic construct
  source 1..19: mol_type = other RNA
attattgtgaggataaaat

SEQ ID NO: 925 - RNA, 19 nt, synthetic construct
  source 1..19: mol_type = other RNA
aggataaaatcatatataa

SEQ ID NO: 926 - RNA, 19 nt, synthetic construct
  source 1..19: mol_type = other RNA
tatataaaatgcccagcat
